(19) United States
(12) Patent Application Publication
(10) Pub. No.: US 2014/0286858 A1
(43) Pub. Date: Sep. 25, 2014

(54) METHOD FOR INDUCING AN IMMUNE RESPONSE FOR TREATMENT OF CANCER AND AUTOIMMUNE DISEASES OR CONDITIONS

(71) Applicant: CEL-SCI CORPORATION, Vienna, VA (US)

(72) Inventors: Daniel H. Zimmerman, Bethesda, MD (US); Eyal Talor, Baltimore, MD (US); Kenneth Steven Rosenthal, Akron, OH (US)

(73) Assignee: CEL-SCI CORPORATION, Vienna, VA (US)

(21) Appl. No.: 14/122,240

(22) PCT Filed: May 24, 2012
(86) PCT No.: PCT/US12/39474

§ 371 Date: May 30, 2014

Related U.S. Application Data
(60) Provisional application No. 61/489,986, filed on May 25, 2011.
(60) Provisional application No. 61/489,926, filed on May 25, 2011.

(51) Int. Cl. A61K 47/48; A61K 51/02; A61K 39/00

(52) U.S. Cl. CPC A61K 47/4833; A61K 39/00; A61K 51/02; A61K 47/48369
USPC 424/1.17; 530/300; 424/184.1; 424/178.1; 424/85.4

(57) ABSTRACT

The invention is related to peptide constracts, i.e., polypeptides obtained by linking together two or more peptides based on or derived from different molecules, which are useful in the treatment or prevention of cancer or the treatment of autoimmune diseases and compositions containing same, methods for producing same, and methods for using same: wherein the peptide constructs have the formula P₁-x-P₂ where P₂ is a peptide associated with forms of cancer or an autoimmune condition and P₁ is a peptide which will bind to a class of immune cells such as dendritic cells. The peptide construct can cause the maturation of immature dendritic cells to a more mature state. The peptide construct or the more mature dendritic cells can be administered to a subject to a modulate or to initiate an immune response against cancer cells, and can be sued with dyes, radioisotopes, or therapeutic agents for detection of the immune target and/or treatment of cancer and autoimmune conditions.

### SEQUENCE LISTING

[0001] This application contains a “Sequence Listing” submitted as an electronic .txt file named “CS_ST25.txt.” The subject matter of the “Sequence Listing” is incorporated herein by reference along with the subject matter of U.S. patent application Ser. Nos. 12/992,687, 11/443,314, 61/489,926 and 61/489,986, U.S. Pat. Nos. 6,995,237 and 7,256,254, and International Published Patent Application WO 2010/120897 A1 (PCT/US2010/031054).

### FIELD OF INVENTION

[0002] The invention generally related to methods and compositions for activating and promoting the maturation of immature dendritic cells or monocytes into matured dendritic cells (DCs) and eliciting favorable properties in the matured dendritic cells.

### BACKGROUND

[0003] Autoimmune conditions are characterized by the body attacking itself by mounting an immune response against self antigens to which it is normally tolerant. As such, approaches to treating autoimmune conditions, have focused on down regulating the “inappropriate” immune response against self. However, many approaches to treating autoimmune and like conditions are not specific to down regulating the immune system's response to a specific antigen. Rather, therapies focus on a general suppression of the immune system. Similarly, cancer can be characterized by increased expression of self oncogenes that are not adequately recognized by the immune system. As such, adjustment of the regulation of the immune system in regards to the identification of self antigens can be used to address both autoimmune conditions and cancer.

[0004] Some of these less antigen specific approaches utilize monoclonal antibodies that act on activated T cells and down regulate them such as by anti-CD3 (Protein Design Laboratories) or block APC and T cell interaction by anti-ICAM-3 (ICOS). MEDI-507 (Medimmune) is believed to be a humanized monoclonal antibody, for psoriasis that also targets CD2, presumably for removing or inactivating those cell types. Other diseases, such as, tissue transplantation rejection and allergies are also being tested by this approach. In contrast to acting on cell surface markers, rhu-mAB-E25 (Genentech) is believed to be a humanized monoclonal antibody against IgE that binds to circulating IgE, with the goal of preventing activation of mast cells. In contrast, other researchers are developing monoclonal antibodies to act on symptoms or agents directly causing disease symptoms. Remicade Infliximab (Centocor™) is purported to be a monoclonal antibody to TNF. Anti CD40 ligand has been used for treatment in animal model of multiple sclerosis (MS) (L. M. Howard, et al., 1999, J. Clin. Invest, 103:281). A recombinant generated designed protein Enbrel (Immunex™) is purported to comprise two molecules of r-DNA derived TNF receptor, and is intended to block TNF's action.

[0005] It should be noted, however, that many of these agents are not sufficiently disease specific and often recognize and could affect normal cellular and body constituents that have a defined and necessary role in normal immune defenses which are still needed.

[0006] Some more antigen or disease specific approaches are exemplified by the attempt to treat MS patients by oral administration of myelin proteins which have recently been reported; the same group of researchers is also using collagen type II for treatment of patients with rheumatoid arthritis. These treatments are designed to attack at the level of the gut associated lymphoid tissues (GALT) to induce tolerance by antigen specific suppression of the immune system. It is not know if these treatments use the intact protein or a hydrolyzate containing smaller peptides. See D. Hafler, et al. 1988, J. Immunol., 141:181; K. Wucherpfennig, et. al. 1990, Science, 248:1016; K. Ota, et al., 1990, Nature, 346:183; and H. Weiner, 1999, PNAS, 88:9161.

[0007] Several researchers are testing peptide based materials for treatment of autoimmune conditions. One approach uses peptide as immunogen, given orally in large quantities. The peptide represents a peptide sequence that is though to be the autoimmune epitope itself or a modified form which may also have altered binding or improved stability properties. By use of the peptide it is thought that either the normal peptide or an altered peptide ligand (APL) will bind to the T cell receptor (TCR) and induce a state of anergy since the multiple sets of bindings that would occur with antigen presentation with an antigen presenting cell (APC) do not occur (A. Faith, et al., 1999, J. Immunol., 162:1836; Soares, et al. 1998, J. Immunol., 160:4768; M. Croft, et al. 1997, J. Immunol., 159:3257; L. Ding, et al., 1998, J. Immunol., 161:6614; and S. Hin, et al. 1999, J. Immunol., 163:2363). Some of the approaches with APL include using related amino acids such a D amino acids (U. Koch, et al. 1998, J. Immunol., 161:421), amino acids with substituted side chains (R. DePalma et al. 1999, J. Immunol., 162:1982), methylene groups to replace peptide bonds in the peptide backbone (L. Meda, et al., 1996, J. Immunol., 157:1213) and N-hydroxyl peptides (S. Hin et al. J. Immunol., 163:2363).

[0008] The more antigen-specific approaches outlined above rely on using large amounts of antigens to desensitize a subject to the antigen. The possible drawbacks and consequences of the administration of large quantities of antigen include further undesirable and unpredictable immune responses. Peptide-based immunomodulators have the possible advantage of being a well-defined immunogen that would facilitate the generation of a safe and predictable response. However, safety is maximized by the use of small quantities of immunomodulators targeted to specific immune cells instead of the use of large quantities of an antigen introduced into the patient.

[0009] Few therapeutics are available as recombinant proteins that can modulate the immune system in active and antigen-specific capacity. Viral vector vaccines have been attempted to promote antigen-specific immunomodulation. However, problems are also associated with viral vector vaccines. One problem is the immune response induced against the vector itself. This induced immune response severely limits the number and frequency of subsequent injections/boosters that can be administered. Moreover, some adenoviruses have the potential for causing allergic conditions such as celiac disease. It is also known that many viral proteins, including some from HIV and HSV contain immunosuppressive epitopes. viral proteins are also suspected as causative agents for other autoimmune conditions such as type 1 diabetes. Multiple Sclerosis (MS), Myocarditis, and Graves disease.

[0010] Another disadvantage in using a DNA-based or viral vector vaccines, including for autoimmune conditions, is the possibility of the vaccine DNA being integrated into the host's genome. One alternative is to conjugate a particular epitope to a carrier protein to avoid such incorporation into the genome. It is known within the art to use large carrier proteins such as Keyhole Limpet Hemocyanin (KLH), Bovine Serum Albumin (BSA), or Antigenics' heat shock proteins (HSP) couple/conjugated or incorporated with a virus protein.

[0011] Other options for peptide delivery of peptide epitopes include the use of synthetic biodegradable microparticles like Poly(lactide-co-glycolide) PLG with aggregated antigen. Still other delivery technologies for peptide antigens include AutoVac™ of Pharmexa. Other small molecule delivery technologies for peptides are Antigen Express's ‘li-key’ delivery, phage display and Multiple Antigen Presentation (MAPS) technologies (Rosenthal 2005 Immune peptide enhancement of peptide based vaccines Frontiers in Bioscience 1:478:482).

[0012] Many of the known approaches have the major disadvantage of using large, very immunogenic carriers. Moreover, patient populations requiring such therapeutics have usually been exposed to many of these same antigens during their lifetimes. Hence, and similar to vaccine vector delivery of antigens, clearance of the antigen can be so vigorous in the previously exposed host that no response will occur to the new antigen. On the other hand, a strong immune response may occur upon reintroduction of the vector. For example, in the case of the conjugate VP22 containing HSV-1 protein, the response may be undesirable given that a majority of adults have had one or more exposures to HSV-1 (Muran-yiova et al. 1991 Immunoprecipitation of herpes simplex virus polypeptides with human sera is related to their ELISA titre. Acta Virol, 35:252-9).

[0013] In regards to immune-based cancer therapies, cancer can have many causes that result in the uncontrolled growth of cells. One cause of cancers is the mutation or increased expression of oncogenes in cancerous cells. Oncogenes, like all genes, function to code for a protein that is synthesized by the cell. Often, cancers are caused by a DNA mutation that alters the regulation of expression of the oncogene or oncofetal gene or a DNA mutation that causes a change in the amino acid sequence of the oncogene itself. The alteration of regulation of an oncogene or oncofetal gene or a mutation in an oncogene or oncofetal can also affect the expression of other proteins in a cancerous cell. Cancerous cells can, therefore, have different levels of protein expression compared with surrounding healthy tissue. A change in the level of protein expression or the expression of mutated proteins on the surface of cancerous can be used by the immune system to direct an immune response to cancerous cells.

[0014] The proteins expressed on the surface of a cancerous cell can act as antigens for an immune response. However, most of the proteins expressed on the surface of cancerous cells are non-mutated self-antigens. Self antigens are usually ineffective in triggering an immune response since they are present in healthy as well as cancerous cells. Even in situations where a cancer cell is expressing a mutated protein, antigenic changes in cancerous cells that are created by individual point mutations may be too subtle from the standpoint of the immune system to trigger a significant immune response. Since cancer cells utilize essentially the same cellular proteins as healthy cells, cancer cells can often grow and survive without generating an anti-cancer immune response.

[0015] Peptides can have sufficient structure to be recognized with specificity by immunoproteins, such as antibodies, and by immune cells. That is, short peptides having from about 8 to about 30 amino acid residues have sufficient structure to bind to antibodies and serve as an antigen, epitope or other ligand for proteins involved in the activation of the immune system. However, short peptides often generate no or only a weak immune response when administered alone to a human or animal subject. Often, it is necessary to link or to introduce short peptides with larger proteins or biomolecules to serve as a carrier or an adjuvant to induce an immune response that will generate antibodies specific to the short peptide and to initiate an immune response to these short peptides.

[0016] There is a need for peptide-based immunomodulators having a well-defined immunogen to treat cancer that facilitates the generation of a safe and predictable anti-tumor response rather than a mixed response including an immune response to a carrier. There is also a need for the development of peptide-based immunomodulators, and the related need for the identification of peptides capable of being recognized by specific components of the immune systems and generating a specific type of directed immune response.

### SUMMARY OF THE INVENTION

[0017] The peptide constructs disclosed herein are based on a Ligand Epitope Antigen Presentation System (LEAPS™) which can convert small peptides, which typically do not exhibit a strong effect on the immune system into antigen specific immunomodulators. The immunomodulators disclosed herein have the ability to promote the differentiation of immature dendritic cells (DCs) to matured DCs that are educated or competent to affect other components of the immune system with respect to specific antigens. The immunogens disclosed herein promote the upregulation of CD11c, CD86 and Major Histocompatibility Complex class II (MHC II) in immature DCs isolated or generated from bone marrow cells, which are phenotypical indications of matured DCs. The matured DCs have an increased production of IL-12, particularly IL-12p70, indicated matured DCs that are competent to signal a TH1-type immune response.

[0018] Upon administration to a subject, DCs matured with the immunomodulator disclosed herein have the capability to locate to a site in the subjects body harboring a source of the antigen to which an autoimmune response is directed. In certain embodiments, the administered matured DCs have the ability to modulate an immune response to an autoimmune antigen.

[0019] In certain embodiments, DCs matured with the immunomodulators disclosed herein have an ability to locate or “target” to a site in the subject's body harboring a source of the antigen and/or the site of an autoimmune condition. The DCs matured with the immunomodulators can be used to diagnose or determine the presence or location in the body of an autoimmune response in a subject to which the matured DCs are administered. The immunomodulators can be conjugated with a radionuclide (including ¹⁸F, ³²P, ⁶⁴Cu, ⁹⁰Y, ^{99m}Tc, ¹³¹I, ¹²⁵I, ¹²⁴I, ⁸⁰Zr, ¹¹¹In, ¹⁸⁸Re, or ¹⁷⁷Lu) that co-locate with the matured DCs. The location of the matured DCs can then be determined through appropriate radiation-detection techniques to diagnose the presence and/or location of an autoimmune condition in the body of the subject.

[0020] In certain embodiments, the matured DCs are conjugated or associated with a radionuclide (including ¹⁸F, ³²P, ⁶⁴Cu, ⁹⁰Y, ^{99m}Tc, ¹³¹I, ¹²⁵I, ¹²⁴I, ⁸⁹Zr, ¹¹¹In, ¹⁸⁸Re, or ¹⁷⁷Lu) that locates to the location of an autoimmune or other undesirable immune response in the body of a subject to which the matured DCs are administered. The radionucleotide can be conjugated to an antibody (mAb) to CD11c or MHC II located on the surface of the matured DCs. In the alternative, an antibody can have specificity to other cell surface markers including DEC-205, Dectin-1, DC-SIGN, and DC-LAMP. In certain embodiments, an mAb binds to markers on the surface of DCs such that the binding of the mAb to the DCs does not alter the activation or changes induced by the peptide construct heteroconjugates described herein.

[0021] In certain embodiments, radiation from radioisotopes can be used for detection by X-ray sensitive films or instruments or related technologies. The compositions of the invention can be detected by single-photon emission tomography/computed tomography (SPECT/CT), and ⁹⁹Tc, ²⁰¹Ti and ⁸⁹Zr can be used to generate photon emission tomography (PET) images. Sources of radiation can be conjugated to the immunomodulator peptide used to mature the DCs or can be conjugated to an mAb having specificity for the matured DCs.

[0022] In certain embodiments, the matured DCs can be conjugated or associated with a therapeutic agent. The therapeutic agent can co-locate to the site of an autoimmune or other undesirable immune response together with matured DCs administered to a subject.

[0023] In certain embodiments, the matured DCs can be conjugated or associated with a dye agent. The dye agent can co-locate to the site of an autoimmune or other undesirable immune response to allow for the diagnostic detection or imaging of the site.

[0024] In certain embodiments, a composition comprising a population of matured dendritic cells is provided. The population of matured dendritic cells is formed by treating immature dendritic cells of monocytes with an effective amount of a peptide construct serving as an immunomodulator having the formula P₁-x-P₂ or P₂-x-P₁ under conditions suitable for maturation of the cells to form the matured or effective dendritic cells which interacts with T cells, where P₂ represents a specific antigenic peptide derived from an autoimmune antigen, P₁ represents an immunomodulatory peptide which is a portion of an immunoprotein capable of promoting binding to a class or subclass of DC cells, and —x— represents a covalent bond or a divalent linking group.

[0025] In certain embodiments, a method for targeting matured or effective dendritic cells to a site of an autoimmune condition in a subject is provided. Immature dendritic cells or monocytes are treated with a peptide construct immunomodulator ex vivo under conditions suitable for maturation of the cells to form more matured or activated dendritic cells, and an effective amount of these matured dendritic cells are administered to the subject, wherein a majority of the dendritic cells administered to the subject locate to the site of an autoimmune or other undesirable immune response.

[0026] Upon administration to a subject, DCs matured ex vivo with the immunogens disclosed herein have the capability to locate to a site in the subjects body harboring a source of the antigen contained in the immunogen such as a cancer tumor, a cluster of cancer cells or any other antigen source. In certain embodiments, the administered matured DCs have the ability to direct an immune response against a source of the antigen, such as cancer cells, such that the subject's immune system can be modulated to kill cancer cells.

[0027] In certain embodiments, DCs matured with the immunogens disclosed herein have an ability to locate or “target” to a site in the subject's body harboring a source of the antigen contained in the immunogen such as a cancer tumor, a cluster of cancer cells or any other antigen source. The ability of DCs matured with the immunogens can be used to diagnose or determine the presence of cancer cells or other sources of antigens in the body of a subject to which the matured DCs are administered. The immunogens can be conjugated with a therapeutic agent or a radionuclide (including ¹⁸P, ³²P, ⁶⁴Cu, ⁹⁰Y, ^{99m}Tc, ¹³¹I, ¹²⁵I, ¹²⁴I, ¹¹¹In, ¹⁸⁸Re, or ¹⁷⁷Lu) that co-locate the matured DCs. The location of the matured DCs can then be determined through appropriate radiation-detection techniques to diagnose the presence and/or location of cancer cells or other sources of antigens in the body of the subject.

[0028] In certain embodiments, the matured DCs are conjugated or associated with a radionuclide (including ¹⁸F, ³²P, ⁶⁴Cu, ⁹⁰Y, ^{99m}Tc, ¹³¹I, ¹²⁵I, ¹²⁴I, ⁸⁹Zr, ¹¹In, ¹⁸⁸Re, or ¹⁷⁷Lu) that locates to the location of cancer cells or other sources of antigens in the body of a subject to which the matured DCs are administered. The radionuclide can be conjugated to an antibody (Mab) to CD11c or CD3 located on the surface of the matured DCs.

[0029] In certain embodiments, the matured DCs is conjugated or associated with a radionuclide that is a source of ionizing radiation. Examples of sources of ionizing radiation include high-energy β-emitters, such as certain isotopes of yttrium or rhenium, α-emitters or position emission such as ⁶⁴Cu, ¹²⁴I and certain isotopes of bismuth or astatine. Matured DCs conjugated or associated with sources of ionizing radiation are used to deliver the ionization radiation primarily at the site of cancer cells or other source of antigen where the antigen is being expressed due to the location of the matured DCs to the site cancer cells or other sources of antigen. High-energy and short half-life gamma emitters can be used for detection of X-ray sensitive films or instruments or related technologies. ¹¹¹In can be detected by single-photon emission tomography/computed tomography (SPECT/CT), and ⁹⁹Te, ²⁰¹Ti and ⁸⁹Zr can be used to generate photon emission tomography (PET) images. Sources of ionizing radiation can be conjugated to immunogen used to mature the DCs or can be conjugated to an mAb having specificity for the matured DCs.

[0030] In certain embodiments, the matured DCs are conjugated or associated with a therapeutic agent which can be cytotoxic or other drug or toxin or cytokine with preferential toxicity to cancerous cells. The therapeutic agent can co-locate to the site cancer cells or other sources of antigen together with matured DCs administered to a subject.

[0031] In certain embodiments, the matured DCs are conjugated or associated with a dye (e.g., fluorescent or luminescent) agent. The dye agent can co-locate to the site of cancer cells or other sources of antigen together with matured DCs administered to a subject and allow for the diagnostic detection or imaging of cancer cells or other sources of antigen.

[0032] In certain embodiments, the LEAPS matured DCs are conjugated or associated with a monoclonal antibody or lectin which reacts or binds with the surface of the DC (such as CD11c, MHC II or other potential DC markers such as DEC-205. Dectin-1, DC-SIGN, DC-LAMP) in a manner that does not alter the response on the LEAPS activated DC and further this Monoclonal antibody can be conjugated or associated with a radioactive nucleotide, drug (cytotoxic drug or other cancer treating drug), toxin, cytokine or staphylococcus endotoxin A or B (SHE or SEB) or a dye (e.g., fluorescent or luminescent) agent.

[0033] In certain embodiments, a composition has a population of matured dendritic cells is provided. The population of matured dendritic cells is formed by treating immature dendritic cells or monocytes with an effective amount of a peptide construct having the formula P₁-x-P₂ or P₂-x-P₁ under conditions suitable for maturation of the cells to form the matured or effective dendritic cells which interacts with T cells, where P₂ represents a specific antigenic peptide derived from a cancer cell. P₁ represents an immunomodulatory peptide which is a portion of an immunoprotein capable of promoting binding to a class or subclass of DC cells, and —x— represents a covalent bond or a divalent linking group.

[0034] A method for targeting matured or effective dendritic cells to a site of cancer cells in a subject is provided. Immature dendritic cells of monocytes are treated with a peptide construct ex vivo under conditions suitable for maturation of the cells to form more matured or activated dendritic cells, and an effective amount of these matured dendritic cells are administered to the subject, wherein a majority of the dendritic cells administered to the subject locate to the site of cancer cells.

[0035] In certain embodiments, a peptide for directing an immune response in an autoimmune condition or to cancer or for maturing dendritic cells is a peptide construct selected from the group consisting of SEQ ID No.'s 291, 293, 315, 317, 319, 325, 331, 339, 341, 347, 355, 782, 786, 804, 828, 856-866, 867-879, 881, 883-884, 886-895, 897, 899-904, 906-916, 964-996, and 1045-1090 or a variant thereof.

[0036] In certain embodiments, a composition containing matured dendritic cells is provided. The matured dendritic cells are formed by contacting immature dendritic cells or monocytes with an effective amount of a peptide construct having the formula P₁-x-P₂ or P₂-x-P₁ under conditions suitable for maturation of the immature dendritic cells to form the matured dendritic cells, wherein P₂ represents a peptide derived from a cancer cell or derived from a protein involved in an autoimmune disease competent for recognition by a class or subclass or immune cells or binding to an antibody: P₁ represents an immunomodulatory peptide which is a portion of an immunoprotein capable of promoting binding to a class or subclass of dendritic cells; and x represents a covalent bond or a divalent linking group.

[0037] In certain embodiments, a composition containing a population of matured dendritic cells is provided. The matured dendritic cells formed are by contacting immature dendritic cells or monocytes with an effective amount of a peptide construct selected from the group consisting of SEQ ID No.'s 291, 293, 315, 317, 319 325, 331, 339, 341, 347, 355, 782, 786, 804, 828, 856-866, 867-879, 881, 883-884, 886-895, 897, 899-904, 906-916, 964-966, and 1045-1090 or a variant thereof under conditions suitable for maturation of the dendritic cells of monocytes.

[0038] In certain embodiments, a method for modulating an immune response in an autoimmune disease or condition or to cancer includes administering an immunologically effective amount of a peptide construct selected from the group consisting of SEQ ID No.'s 291, 293, 315, 317, 319, 325, 331, 339, 341, 347, 355, 782, 786, 804, 828, 856-866, 867-879, 881, 883-884, 886-895, 897, 899-904, 906-916, 964-966, and 1045-1090 or a variant thereof or a variant thereof to a subject.

[0039] In certain embodiments, a method for producing a matured dendritic cell population is performed by contacting or treating immature dendritic cells or monocytes with an effective amount of a peptide construct having the formula P₁-X-P₂ or P₂-X-P₁ under conditions suitable for maturation of dendritic cells or monocytes to form matured dendritic cells, wherein P₂ represents a peptide derived from a cancer cell or derived from a protein involved in an autoimmune disease competent for recognition by a class or subclass of immune cells or binding to an antibody: P₁ represents an immunomodulatory peptide which is a protein of an immunoprotein capable of promoting binding to a class or subclass of dendritic cells; and x represents a covalent bond or a divalent peptide linking group.

[0040] In certain embodiments, a tracking marker or a therapeutic agent is conjugated to an antibody having affinity for any one of MHC II, CD11c, DEC-205, Dectin-1, DC-SIGN, and DC-LAMP.

[0041] In certain embodiments, matured dendritic cells exhibit an upregulation of one or more of CD80, CD86 and Major Histocompatibility Complex II relative to immature dendritic cells or monocytes not contacted with the peptide construct.

[0042] In certain embodiments, matured dendritic cells are isolated away from bone marrow or blood tissues.

[0043] In certain embodiments, matured dendritic cells produce an increased amount of Interleukin 12p70 (IL-12p70) compared to immature dendritic cells or monocytes not contacted with the peptide construct.

[0044] In certain embodiments, a therapeutic agent or a tracking marker is conjugated to a peptide conjugate the peptide construct is conjugated to the therapeutic agent by a cathepsin cleavable valine-citrulline dipeptide linker or by linking with a cysteine or lysine residue of the peptide construct by conjugation to a group selected from OH groups, COOH groups, amine groups, and amide groups of the peptide construct.

[0045] In certain embodiments, a peptide construct is conjugated to a lysomatropic agent.

[0046] In certain embodiments, an immune response in a subject is modulated in response to an autoimmune disease or condition or against cancer by contracting immature dendritic cells or monocytes with a peptide construct having the formula P₁-x-P₂ or P₂-x-P₁ under conditions suitable for maturation of the cells to form matured dendritic cells and administering an effective amount of the matured dendritic cells to the subject. In the peptide construct, P₂ represents a peptide derived from a cancer cell or derived from a protein involved in an autoimmune disease competent for recognition by a class or subclass of immune cells or binding to an antibody: P₁ represents an immunomodulatory peptide which is a portion of an immunoprotein capable of promoting binding to a class or subclass of dendritic cells; and x represents a covalent bond or a divalent peptide linking group.

[0047] In certain embodiments, the peptide construct having the formula P₁-x-P₂ or P₂-x-P₁ has a peptide P₁ selected from the group consisting of SEQ ID No.'s 4-6, 13, 15, 27, 48 and 49 or variants thereof.

[0048] In certain embodiments, the peptide construct having the formula P₁-x-P₂ has a peptide P₂ selected from one of the following groups; the group consisting of SEQ ID No.'s 51, 53, 55 and 960-961; SEQ ID No.'s SEQ ID No.'s 51, 53, 55 and 960-961; the group consisting of SEQ ID No.'s 72, 749, 751, 753, 755 and 917; the group consisting of SEQ ID No.'s 74, 76, 78, 80, 82, 84, 86, 88, 90, 92, 98, 103, 449, 452, 469, 918, 957 and 958; the group consisting of SEQ ID No.'s 1, 474, 477, 482, 487, 490, 493 and 812 and 962-963; SEQ ID No.'s 496, 499, 919, 920, 921, and 922; the group consisting of SEQ ID No.'s 2, 524, 527, 549, 552, 555, 572, 581, 588, 597, 606, 609, 612, 623, 636, 641, 924, 925, 950 and 959; SEQ ID No.'s 653 and 664; the group consisting of SEQ ID No.'s 3 and 927; SEQ ID No. 774; the group consisting of SEQ ID No.'s 19, 737, 738, 951; SEQ ID No.'s 928 and 947; the group consisting of SEQ ID No.'s 929 and 948; the group consisting of SEQ ID No.'s 930936 and 949; the group consisting of SEQ ID No.'s 937-940; the group consisting of SEQ ID No.'s 941-942; the group consisting of SEQ ID No.'s 943-944; and the group consisting of SEQ ID No.'s 945-946, or variants of any of the foregoing sequences.

[0049] In certain embodiments, the peptide construct having the formula P₁-x-P₂ has a peptide P₂ selected from one of the following groups; the group consisting of SEQ ID No.'s 967-969 and 1013-1014; the group consisting of SEQ ID No.'s 973-978 and 1016-1021; the group consisting of SEQ ID No.'s 979-980 and 1022-1023; the group consisting of SEQ ID No.'s 981-988 1024-1031; the group consisting of SEQ ID No.'s 989-990 and 1032-1033; the group consisting of SEQ ID No.'s 991-995 and 1034-1035; the group consisting of SEQ ID No.'s 996-999 and 1036-1039; the group consisting of SEQ ID No.'s 1000-1006 and 1040-1043; the group consisting of SEQ ID No.'s 1007-1011 and the group consisting of SEQ ID No.'s 1012 and 1044), or variants of any of the foregoing sequences.

[0050] In certain embodiments, the peptide construct is selected from one of the following groups: the group consisting of SEQ ID No.'s SEQ ID No.'s 291, 293, 856 and 964-965 SEQ ID No.'s 857-861; the group consisting SEQ ID No.'s 315, 317, 319, 325, 331, 339, 341, 862 and 863-870; SEQ ID No.'s 347, 828, 871-876 and 966; the group consisting SEQ ID No.'s 781, 877, 878, 879; SEQ ID No.'s 881, 883-884, 886-895, 897 and 899-900; SEQ ID No.'s 786 and 901; SEQ ID No. 902; the group consisting SEQ ID No.'s 355, 903 and 904; SEQ ID No. 804; SEQ ID No. 906; SEQ ID No. 907; the group consisting SEQ ID No.'s 908-911; the group consisting SEQ ID No.'s 912-913; the group consisting SEQ ID No. 914; SEQ ID No. 915 and SEQ ID No. 916, or variants of any of the foregoing sequences.

[0051] In certain embodiments, the peptide construct is selected from one of the following groups; the group consisting of SEQ ID No.'s 1045-1049; the group consisting of SEQ ID No.'s 1051-1056; the group consisting of SEQ ID No.'s 1057-1058; the group consisting SEQ ID No.'s 1059-1066; SEQ ID No.'s 1067-1068; the group consisting SEQ ID No.'s 1069-1073; the group consisting SEQ ID No.'s 1074-1077; the group consisting SEQ ID No.'s 1078-1084; SEQ ID No.'s 1085-1089; SEQ ID No. 1050 and SEQ ID No. 1090.

[0052] One of ordinary skill in the art will appreciate that other aspects of this invention will become apparent upon review of the following detailed description.

### BRIEF DESCRIPTION OF THE DRAWINGS

[0053] FIGS. 1A-1B show response of C57BL/6 bone marrow cells to JgD, J, gD, or JH immunogen treatments. JgD, J, gD, or JH were added to the BM cell suspensions and incubated for 48 hrs. In FIG. 1A, cells from 3 mice were then stained with PE-anti-CD11c and in FIG. 1B, PE-anti-CD86, and flow cytometry was performed on cells within the suspension with light scatter parameters of monocytes. The X-mean for each evaluation indicates extent of antigen expression.

[0054] FIG. 2 shows Kaplan-Meier survival curve for mice vaccinated with either the JgD LEAPS® heteroconjugate-treated DC or untreated BM receiving lethal challenge with herpes simplex virus type 1 by zosteriform challenge.

[0055] FIG. 3 shows reduction in symptoms of mice (see FIG. 2) treated with JgD LEAPS™ heteroconjugate-treated DC as compared with: No treatment; Untreated BM; J-H; or JH LEAPS™ heteroconjugate-treated DC.

[0056] FIG. 4 represent a study where CEL-2000 treatment with 2 doses of 33 or 100 nmol was given subcutaneously on days 0 and 7 or days 0 and 14. Most regimes reduced the progression of arthritis disease to levels that were at least as good as those of mice treated with Enbrel® (every other day for the 28 days of the study). Immunization of mice with the 100 nmol dose (3× treatment) on days 0 and 7 appeared to limit the progression of disease throughout the experimental period. The CEL-2003 links the murine collagen II peptide, residues 254-273 (CH₂₅₄₋₂₇₃), sequence to the J ICBL. This trial suggests that the dosage and schedule of administration (time between initial and second immunization) are important parameters of CEL-2000 treatment. Use of a student “t” Test analysis of Treatment groups at day 7 days 14 and 21 to calculate the p value showed the 3× dose of CEL-2000 on day 0 and 14 followed by 3× dose on day 0 and 7 or 1× dose on day 0 and 7 is equivalent to 0 and 14 and slightly better than Enbrel® every other day for all 28 days.

### DETAILED DESCRIPTION OF THE INVENTION

[0057] The present invention provides LEAPS™ peptide heteroconjugates useful as immunomodulators for modulated the immune response to an autoimmune condition. The present invention further provides LEAPS™ peptide heteroconjugates useful for treatment of cancers and localization of these LEAPS™ heteroconjugate-activated DCs at the site of cancer tumors and clusters of cancer cells. The DCs can be labeled to detect or visualize the site of the ongoing disease or cancer in the body of a subject. The novel heteroconjugates disclosed herein are based upon epitope or antigen sequences associated with a protein (or peptide) for specific forms of cancer.

[0058] The LEAPS™ peptide heteroconjugates disclosed herein have a protein sequence that binds to a specific class or subclass of immune cells and a protein sequence corresponding with an antigen. The LEAPS™ peptide heteroconjugates can be used to directly modulate the response of the immune system or specific immune cells to the antigen sequence. As such, the LEAPS™ peptide heteroconjugates disclosed herein can be used to direct an immune response against antigen sequences expressed by cancerous cells.

[0059] Various antigens associated with autoimmune conditions, often with defined epitopes recognized for some Human Leukocyte Antigens (HLA) genotypes, have been identified, including those associated with Insulin Dependent Diabetes Mellitis (IDDM), Rheumatoid Arthritis (RA) (e.g. collagen type II 390-402 IAGFKGEQGPKGE (SEQ ID No. 1), Systemic Lupus Erythematousis (SLE), Ankyosing Spondylitis (AS), Pemphius Vulgaris (PV) (epidermal cell adhesion molecule desmoglein 190-204). Multiple Sclerosis (MS), Myelinproteolipid (MPL) (peptide sequence KNIVTPRT (SEQ ID No. 2), certain types of psoriasis, and uveoretintis (Hammer et al., HLA class I peptide binding specificity and autoimmunity, 1997, Adv. Immunol, 66:67 Tisch et al., Induction of Glutamic Acid Decarboxylase 65-Specific Th2 Cells and Suppression of Autoimmune Diabetes at Late Stages of Disease Is Epitope Dependent 1999, J. Immunol. 163:1178; Yoon et al., Control of Autoimmune Diabetes in NOD Mice by GAD Expression or Suppression in .beta. Cells 1999, Science 284:1183; Ruiz et al., Suppressive Immunization with DNA Encoding a Self-Peptide Prevents Autoimmune Disease: Modulation of T Cell Costimulation 1999, J. Immunol., 162:3336; Kreo et al., Identification of T Cell Determinants on Human Type II Collagen Recognized by HLA-DQ8 and HLA-DQ6 Transgenic Mice 1999, J. Immunol, 163:1661). In other cases, peptides are known that induce in animals, a condition similar to ones found in humans, such as GDKVSFFCKNKEKKC (SEQ ID No. 3) for antiphospholipid antibodies associated with thrombosis (Gharavi et al., GDKV-Induced Antiphospholipid Antibodies Enhance Thrombosis and Activate Endothelial Cells In Vivo and In Vitro 1999, J. Immunol., 163:2922) or myelin peptides for experimental autoimmune encephalitis (EAE) as a model for MS (Ruiz et al., supra. Araga et al., A Complementary Peptide Vaccine That Induces T Cell Anergy and Prevents Experimental Allergic Neuritis in Lewis Rats 1999, J. Immunol., 163:476-482; Karin et al., Short Peptide-Based Tolerogens Without Self-Antigenic or pathogenic Activity Reverse Autoimmune Disease 1999, J. Immunol, 160:5188; Howard et al., Mechanisms of immunotherapeutic intervention by anti-CD40L (CD154) antibody in an animal model of multiple sclerosis 1999, J. Clin Invest., 103:281).

[0060] Moreover, glutamic acid decarboxylase (GAD) and specific peptides have been identified associated with IDDM (Tisch et al., supra; Yoon et al., supra). Many of these conditions are also characterized by elevated levels of one or more different cytokines and other effectors such as Tumor Necrosis Factor (TNF) (Kleinau et al., Importance of CD23 for Collagen-Induced Arthritis: Delayed Onset and Reduced Severity in CD23-Deficient Mice 1999, J. Immunol. 162:4266; Preckel et al., Partial agonism and independent modulation of T cell receptor and CD8 in hapten-specific cytotoxic T cells 1998. Eur. J. Immunol., 28:3706; Wooley et al., Influence of a recombinant human soluble tumor necrosis factor receptor FC fusion protein on type II collagen-induced arthritis in mice 1993, J. Immunol., 151:6602) as well as auto-antibodies, including in some cases, anti-costimulator molecules, in particular, those for Cytotoxic T-lymphocyte-Associated protein 4 ((CTLA-4) (CD152)) on CD4+ cells (Matsul et al., Autoantibodies to T Cell Costimulatory Molecules in Systemic Autoimmune Diseases 1999, J. Immunol., 162:4328).

### Definitions

[0061] Unless defined otherwise, all technical and scientific terms used herein generally have the same meaning as commonly understood by one of ordinary skill in the relevant art.

[0062] The articles “a” and “an” are used herein to refer to one or to more than one (i.e., to at least one) of the grammatical object of the article. By way of example, “an element” means one element or more than one element. means one element or more than one element.

[0063] The term “adjuvant” refers to substance that accelerates, prolongs or enhances antigen-specific immune responses when used in combination with vaccine antigens.

[0064] The terms “administering,” “administer,” “delivering,” “deliver,” “introducing,” and “introduce” can be used interchangeably to indicate the introduction of a therapeutic or diagnostic agent into the body of a patient in need thereof to treat a disease or condition, and can further mean the introduction of any agent into the body for any purpose.

[0065] The term “antigen” refers to a substance or molecule that generates an immune response when introduced to the body or any molecule or fragment thereof now also refers to any molecule or molecular fragment that can be bound by a major histocompatibility complex (MHC).

[0066] The term “autoimmune disease” refers to a condition where a subject's own immune system directs an immune response against the subject's own cells and tissues. Autoimmune diseases include, but are not limited to, rheumatoid arthritis.

[0067] The term “blood tissue” refers to cells suspended in or in contact with plasma.

[0068] The term “bone marrow cell” refers to any cell originating from the interior of bones.

[0069] The terms “CD80,” “CD86,” “CD11c, “CD85” and similar terms refer to cell surface molecules present on leukocyte cells through a nomenclature protocol maintained by Human Cell Differentiation Molecules (www.hedm.org: Paris, France).

[0070] The terms “conjugate” “conjugation” and similar terms refer to two species being spatially associated with each other by covalent linkage, non-covalent binding or by a combination of covalent linkage and non-covalent binding. For example, an antibody can be conjugated to an epitope through non-covalent binding to the epitope as well as the antibody serving to conjugate the epitope (such as a cell surface marker) to a compound that is linked to the antibody.

[0071] The term “comprising” includes the recited steps, elements, structures or compositions of matter and does not exclude any un-recited elements, structures or compositions of matter.

[0072] The term “consisting of” includes and is limited to whatever follows the phrase the phrase “consisting of.” Thus, the phrase indicates that the limited elements are required or mandatory and that no other elements may be present.

[0073] The phrase “consisting essentially of” includes any elements listed after the phrase and is limited to other elements that do not interfere with or contribute to the activity or action specified in the disclosure for the listed elements. Thus, the phrase indicates that the listed elements are required or mandatory but that other elements are optional and may or may not be present, depending upon whether or not they affect the activity or action of the listed elements.

[0074] A “dendritic cell” or “DC” refers to an antigen-presenting leukocyte that is found in the skin, mucosa, and lymphoid tissues, and having a capability under appropriate conditions to initiate a primary immune response by activating T cells, lymphocytes and/or secreting cytokines.

[0075] The term “diagnostic” refers to any technique for determining the presence of any particular autoimmune condition or antigen in a subject.

[0076] The term “divalent linker” refers to any moiety having a structure forming a peptide bond to a first peptide moiety and forming a second bond to a second peptide moiety.

[0077] The term “effect amount” is an amount of a therapeutic which produces a therapeutic response, including an immune response, in the subject to which the therapeutic is administered.

[0078] The term “autologous” refers to a situation where the donor and recipient of cells, fluids or other biological sample is the same person.

[0079] The term “homologous” refers to a situation where the donor are recipient of cells, fluids or other biological sample or material are not the same individual.

[0080] The term “infection” refers to the colonization in a host organism by a pathogenic agent that can include parasites, viruses, and bacteria.

[0081] An “immature dendritic cell” is a “dendritic cell” in a state characteristic of immune cells prior to contact with an antigen and having a limited present ability to active T cells, lymphocytes and/or to secrete cytokines; however, “immature dendritic cells” may acquire the ability to activate T cells, lymphocytes and secrete cytokines upon contact with an antigen.

[0082] The terms “immunomodulatory” and “immunoprotein” refer to a protein, peptide or cell having the ability to bind or interact with an immune cell to alter or to regulate one or more immune functions.

[0083] The term “Interleukin 12p70” refers to a cytokine produced by dendritic cells capable of directing the development of lymphocytes in a TH1 immune response, and possessing two peptides of approximately 40 kd and 35 kd in size.

[0084] The terms “isolated matured dendritic cells” or “isolated dendritic cells” refer to dendritic cells suspended in a liquid medium, a cell culture or a composition wherein at least 50% of the viable cells present in the liquid medium, the cell culture or the composition are dendritic cells or monocytes.

[0085] An “isotype control” is an antibody having the same serological structure and can have a fluorescent conjugate dye as an antibody conjugate having affinity for a cellular surface or cytokine marker, except the isotype control does not have affinity for the cellular surface or cytokine marker.

[0086] A “heteroconjugate” refers to a protein or peptide containing at least two amino acid sequences covalently linked to form a single molecular, wherein two sequences originate or are homologous to proteins expressed by different genes.

[0087] The term “maturation” refers to a process for generating a “matured dendritic cell.”

[0088] The terms “matured dendritic cell,” “maturated dendritic cell,” “activated dendritic cell” or “effective dendritic cell” refer to a “dendritic cell” in a state characteristic of cells after contact with an antigen and having a present ability to initiate a primary immune response by activating T cells, lymphocytes and/or secreting cytokines.

[0089] The term “monocyte” refers to immune cells produced by bone marrow and haematopoietic stem cell having the ability to differentiate into macrophages or dendritic cells.

[0090] The term “magnetic resonance imaging” refers to any technique where information is collected from the exposure of a subject or sample to a magnetic field.

[0091] The terms “originating” and “derived” as related to peptide sequences refers to an organism or cell type that produces a protein containing

[0092] The term “paramagnetic contrast agent” refers to any agent having paramagnetic behavior in an applied magnetic field indicated by a positive magnetic susceptibility.

[0093] The terms “peptide” and “peptide construct” refer to molecule including two or more amino acid residues linked by a peptide bond. The term “peptide” indicates molecular species where only part of the molecule has peptide character and/or where two parts or the molecular species formed of peptide bonds are covalently linked by a divalent linker.

[0094] The term “phenotype” as relating to the phenotype of immune cells refers to any observable characteristic or trait of a cell such as its morphology, development, biochemical or physiological properties including the expression or presence of specific cell surface proteins or markers.

[0095] The term “prophylactic” or “prophylactically” refers to a method or use of a peptide, cells or biological matter in a manner to prevent the onset or occurrence of a disease or infection including use as a vaccine.

[0096] The term “red blood cells” refers to erythrocytes having an intact phospholipid bilayer membrane.

[0097] The term “subject” or “patient” refers to an animal, including mice and humans, to which a therapeutic agent is administered.

[0098] The term “systemic immune response” refers to an immune response where antibodies, cytokines, or immune cells generated by the immune response are detectable throughout the circulatory and lymph systems of the body.

[0099] The term “T cell” refers to a lymphocytes having a T cell receptor protein on the surface of the cell.

[0100] The terms “treating” “treatment” as related to treating or treatment of immune cells refers to bringing an immune cell into contact with a substance or composition for a time period sufficient to cause a change in phenotype.

[0101] The term “vaccine” refers to compositions containing one or more antigens that stimulates an immune response when administered to an organism in vivo.

### Structure of Immunomodulatory LEAPS™ Heteroconjugates

[0102] The peptide constructs disclosed herein are based on LEAPS™ technology and are heteroconjugates of two peptides which are linked together covalently. The peptide heteroconjugates or constructs can be synthesized artificially using solid-phase synthesis or other synthetic technique or expressed using recombinant DNA technology. The two peptides can be synthesized separately and joined covalently or can be synthesized or expressed as a single construct. A first peptide (hereinafter may be referred to as Peptide P₁) of the heterconjugate is a portion of an immunoprotein capable of promoting binding to a class or subclass of dendritic cells (DCs) or T cells and is referred to as an immune cell binding ligand (ICBL). Without wishing to be bound by any particular theory, it is believed that Peptide P₁ has a structure for promoting interaction and/or binding with specific surface receptors present on DCs. Peptide P₁ can be a peptide sequence derived from Major Histocompatibility Complex (MHC) I or II. A more detailed discussion of the Peptide P₁ and peptide heteroconjugates involved with LEAPS™ technology can be found in U.S. Pat. No. 5,652,342, which is incorporated herein by reference.

[0103] A second peptide (hereinafter may be referred to as Peptide P₂) is a specific antigen peptide derived from and/or associated with an autoimmune condition or derived from a cancer cell. Without being wishing to be bound by any particular theory, it is believed that the antigen Peptide P₂ being covalently linked to the ICBL Peptide P₁ allows for a more effective recognition of the antigen Peptide P₂ by the immune system and specific immune cells thus allowing for antigen-specific immunomodulation. Peptide epitopes having a limited number of amino acid residues have sufficient structure to be bound by an antibody or an MHC molecule with a high degree of specificity. However, peptide epitopes of limited size are less competent to cross-link immunoglobulins to cause lymphocyte activation and/or capable of inducing an immune reaction or immunomodulations. As such, small peptide epitopes introduced into a subject may produce a poor immune response.

[0104] In the LEAPS™ heteroconjugates disclosed herein, the antigen Peptide P₂ is covalently bound to ICBL Peptide P₁ or other immunomodulatory peptide having the capability to bind to molecules present on the surface of dendritic cells or monocytes. Once bound to the surface of a dendritic cell, the antigen Peptide P₂ can then be recognized by local T cell receptor (TCR) or Major Histocompatibility Complex (MHC) molecules to trigger a corresponding immune response and/or immunomodulation through an immune recognition of the antigen Peptide P₂. In certain embodiments, DCs are treated or contracted with a LEAPS™ heteroconjugate ex vivo away from a subject's body and then administered to the subject. Through such a mechanism, the immune system of a subject to whom the LEAPS™ heteroconjugate-activated DCs are administered can be modulated to have a modulated response to a source of antigen with the body involved with the autoimmune condition. In certain other embodiments, the LEAPS™ heteroconjugate-activated DCs when administered to a subject locate to the site of a source of the antigen, whether such antigen source is a self-antigen involved in an autoimmune condition. The LEAPS™ heteroconjugate-activated DCs can be associated or conjugated with a radio label, dye, therapeutic compound or source of ionizing radiation to assist with the detection or imaging of the antigen source or to deliver the therapeutic compound or ionizing radiation to the site of the antigen source.

[0105] A further aspect of the LEAPS™ heteroconjugates disclosed herein is that the extent of pro-inflammatory or inflammatory cytokines produced during the immune response to the peptide constructs is reduced relative to levels typically associated with larger antigen proteins containing many different epitope sequences. Further, a Th1 type of immune response or a Th2 type of immune response may be promoted based upon the identity of the ICBL Peptide P₁ conjugated with the antigen Peptide P₂.

[0106] A further aspect of the LEAPS™ heteroconjugates disclosed herein is that the heteroconjugates can be treated or contacted with dendritic cells isolated from a subject or donor under conditions where the dendritic cells differentiate into more matured immune cells capable of directing immunity toward the antigen peptide sequence contained within the LEAPS™ heteroconjugates. The matured DCs can modulate immune response to sources of the antigen within the body of a subject to whom the matured DCs are administered.

[0107] The LEAPS™ heteroconjugates disclosed herein can assist in generating an active immune response to an antigen derived from a cancer cell. However, LEAPS™ heteroconjugates can also operate to downwards regulate the immune response to self antigens in individuals with an active autoimmune disease. As the Example below demonstrate, the LEAPS™ heteroconjugates disclosed herein have the capability to modulate an undesirable. autoimmune response and cause a reduction in symptoms. The exact mechanism for immune modulation and/or a decrease in immune response in an antigen-specific matter is not fully known, and Applicants do not wish be bound by any particular theory regarding the mechanism of operation of the LEAPS™ heteroconjugates disclosed herein. In a study of the affect of LEAPS˜ heteroconjugates in experimental autoimmune myocarditis (EAM), immunization of A/J mice with a LEAPS™ heteroconjugate having the pathogenic My-1 peptide from murine cardiac myosin linked to “J” peptide (described below) conferred both protection and treatment against EAM. These findings were for a L.E.A.P.S. vaccine protecting against EAM, a condition induced in A/J mice with the My-1 peptide from murine cardiac myosin. While the J-My-1 vaccine was not evaluated with other models, this condition can be induced by coxsackie virus B3 infection as well as immunization with murine cardiac myosin (MCM) 1. Therapies for EAM induced by My-1 such as monoclonal antibodies (for TNF-.alpha or IL-1, beta.), anti-complement receptor, cobra venom or recombinant proteins such as IFN-gamma are effective only if given in the first week, during the induction phase but are ineffective when given by day 10 or later. (Cihakova D. J G. Barin, M Kimura, G C Baldeviano, M V Talor, D H Zimmerman, E Taylor, N R Rose, 2008 Conjugated Peptide Ligand is Able to Prevent and Treat Experimental Autoimmune Myocarditis, is a Strong Stimulator of Cell and Humoral Immunity. Int Immunopharmacol 8:625-633 (which is incorporated herein by reference).

[0108] One possible conclusion is that the LEAPS™ heteroconjugate vaccine J-My1 was antigen specific (for My-1), did not induce a general anergy as no effect for the anti PPD response, had little effect on antibody to My-1, reduced proliferative responses to My-1 and did this without acting as a general mitogen or polyclonal activator. Expanded numbers of activated CD69+, CD44+, CD4+, and CD8+ cells, as well as increased CD11c+ DCs were observed in the spleens. No differences in CD4+, CD25+, and FoxP3+ Treg cell numbers were detected in the spleen or the target heart organ. Examination of the chemokine and cytokine response with the Quantikine ELISA kits for IFN-gamma, TGF-13, TNF-alpha, IL-1-alpha, IL4, IL10, IL2. Histamine, IP-10, MIP-1-alpha of sera and spleens were unremarkable, however cardiac tissue showed a significant decrease in MIP-1-alpha and IP10. This is in contrast to the elevated levels of these molecules in another EAM model and the ability of monoclonal antibody ablation to MIP-1-alpha or MCP-1 to reduce disease severity. Although IL-17 may be involved, it was not studied as reagents were not available.

[0109] Regardless of the theoretical mechanism for the action of LEAPS™ heteroconjugate vaccines in modulating immune response, the disclosure shows how to make and use effective LEAPS™ heteroconjugates.

### LEAPS™ Heteroconjugates

[0110] Specifically, the novel peptide heteroconjugates of this invention include peptide constructs of the following Formulae (I) and (II):

P₁-x-P₂ (I)

P₂-x-P₁ (II)

where peptide P₂ is an antigen peptide associated with an autoimmune disease condition or associated with a cancer cell. It is believed that the antigen peptide P₂ binds to an antigen receptor on a set or subset of dendritic cells or T cell. P₁ is an immune response modifying peptide, which will cause a directed immune response by said set or subset of DCs or T cells to which the peptide P₁ is bound and modulates an immune response focused on IL-12 without or with low levels of pro-inflammatory or inflammatory cytokines (Patricia R Taylor; Christopher A Paustian, Gary K Koski, Daniel H Zimmerman, K S Rosenthal. Maturation of dendritic cell precursors into IL12 producing DCs by J-LEAPS. Cellular Immunology, 2010, 262:1-5; Taylor P R, G K Koski, C C Paustian, P A Cohen, F B-G Moore, D H Zimmerman, K S Rosenthal, J-L.E.A.P.S.™ Vaccines Initiate Murine TH1 Responses By Activating Dendritic Cells, Vaccine 2010: 28:5533-4, both of which are incorporated herein by reference). As shown in Formulae (I) and (II), the Peptide P₁ can be N-terminal or C-terminal to the Peptide P₂.

[0111] In certain embodiments, the Peptide P₁ contains an ICBL termed “J” or “Peptide J.” Peptide J is derived from amino acids 38-50 from the β-2-microglobulin chain of the MHC 1 molecule (DLLKNGERIEKVE) (SEQ ID No. 49). ICBL Peptide J is believed, but is not limited to, promoting Th1-type immune responses to the coupled antigen P₂ peptide.

[0112] In certain embodiments, the Peptide P₁ of the peptide constructs contains an ICBL termed “CEL-1000” (DGQEEKAGVVSTGLI) (SEQ ID No. 48). The CEL-1000 peptide is derived from the β-chain of MHC II (MHC II β134-148) and binds to murine as well as human CD4+ cells. The chemical structure of conjugated peptides containing CEL-1000 can have an amidated carboxyl terminal, (amino)-DGQEEKAGVVSTGLI-(amide). CEL-1000 can be prepared by F-MOC chemistry and purified by Reverse Phase (RP)-HPLC, analyzed by another RP-PLC system, ion exchange chromatography (IEC)-HPLC as well as mass spectroscopy. Based on site directed mutagenesis studies of MHC II β-chain and/or peptide competition studies, peptides such as CEL-1000, were shown to bind to CD4, a T cell co-stimulator molecule (Cammarota et al., Identification of a CD4 binding site on the beta 2 domain of HLA-DR molecules. Nature, 1992: 356:799-801) and cell surface protein on some Dendritic Cell (DCs) (Konig, et. al., MHC class II interaction with CD4 medicated by a region analogous to the MHC class I binding site for CD8, Nature, 1992: 356:796-798; Shen X. and Konig R., “Regulation of T cell immunity and tolerance in vivo by CD4”, Int. Immunol., 1998 10:247-57; Shen X. et al., Peptides corresponding to CD4-interacting regions of murine MHC class II molecules modulate immune responses of CD4+ T lymphocytes in vitro and in vivo, J. Immunol., 1996; 157:87-100, all of which are incorporated herein by reference).

[0113] In certain embodiments, the Peptide P₁ contains an ICBL termed “G” or “peptide G.” Peptide G has the sequence NGQEEKAGVVSTGLI (SEQ ID No. 15) derived from the MHC-II beta 2 chain (Zimmerman et al., A new approach to T cell activation: natural and synthetic conjugates capable of activating T cells, 1996, Vacc. Res., 1996: 5:91, 5:102: Rosenthal et al., Immunization with a LEAPS™ heteroconjugate containing a CTL epitope and a peptide from beta-2-microglobulin elicits a protective and DTH response to herpes simplex virus type 1, 1999, Vaccine, 1999: 17(6):535-542, both of which are incorporated herein by reference). In another embodiment, the Peptide P₁ contains Hu IL-10 and has the sequence DNQLLETCKQDRLRNRRGNGSSTHFEGNLPC (SEQ ID No. 27) (Gesser et al., Identification of functional domains on human interleukin 10 1997, Proc. Nat. Acad. Sci. 94:14620).

[0114] In certain embodiments, the Peptide P₁ contains an ICBL termed “IL-1β” or “Peptide IL-1β.” Peptide IL-1β has the sequence VQGEESNDK (SEQ ID No. 13) derived from the human interleukin-1β chain (e.g., Bajpai et al., Immunomodulating activity of analogs of noninflammatory fragment 163-171 of human interleukin-1beta 1998 Immunopharmacology, 38:237, incorporated herein by reference).

[0115] In certain addition embodiments, the Peptide P₁ contains ICAM-1 LFA-3 (aa26-42). VLWKKQKDKVAELENSE (SEQ ID No. 4); a TNF-α ligand portion such as amino acids 70-80 PSTHVLITHTI (SEQ ID No. 5); or the peptide represented by peptide represented by DFLPHYKNTSLGHRP (SEQ ID No. 6).

[0116] Epitope sequences that can serve as the antigen Peptide P₂ and conjugated with the ICBL Peptide P₁ to form a LEAPS™ heteroconjugate will now be described. The antigen Peptide P₂ can be selected from protein sequences associated with different types of autoimmune conditions, including Alzheimer's dementia (immune response to ameloid β protein implicated), myocarditis, diabetes mellitus, rheumatoid arthritis, pemphigus vulgaris, multiple sclerosis, uveoretinitis, thrombosis, myastmenia gravis, psoriasis, pernicious anemia, autoimmune hepatitis, systemic lupus erythematosus, rheumatic fever, Graves disease, systemic sclerosis, and Goodpature's syndrome. While Alzheimer's dementia may not generally be considered to be a disorder of the immune system, plaques formed by Alzheimer's can be treated in a similar manner as autoimmune diseases. As such, Alzheimer's disease is considered to be within the scope of autoimmune diseases treatable through the use of LEAPS™ heteroconjugates as disclosed herein.

[0117] In other embodiments, epitope sequences that can serve as the antigen P₂ peptide and conjugated with the ICBL Peptide P₁ to form a LEAPS™ heteroconjugate can be selected from protein sequences associated with different types of cancer including liver, colon, breast, cervical, melanoma, prostate, ovarian, colorectal, gastric, lung and cervical cancers. Protein sequences and antigens associated with cancer ultimately derive from the host's own genome. As such, antigens associated with cancer can have a weak immune response due to suppression of the recognition of self-antigens by a host. However, some cancer cells express proteins, some of which are present on the surface of cancer cells that contain mutations compared to surrounding non-cancerous cells. However, even the presence of mutated proteins in cancers often does not engender a strong host immune response since such mutated protein sequences are often not processed by antigen presenting cells (APCs), which is a typical first step in directing an immune response against a specific antigenic peptide sequence.

[0118] LEAPS™ heteroconjugates having immunomodulatory effects on specific autoimmune conditions or having immunomodulatory effects toward cancer are contemplated containing any combination of sequences selected from embodiments of Peptide P₁ ICBLs, described above, and Peptide P₂ presented on Table 1 for autoimmune diseases or Table 2 for cancer having the structure of one of Formulae (I) and (II), as described above. In Formulae (I) and (II), —x— represents a covalent bond or a divalent peptide linking group providing a covalent linkage between Peptide P₁ and Peptide P₂. In certain embodiments, —x— is a divalent peptide linking group having one or more glycine residues, such as the divalent linking group -GGG- or -GG-. In order to avoid synthesis of peptides having four glycine residues in a row, which may be hard to synthesize, a linking group of —GG— can be used. Divalent linkers containing the residue serine can also be present in the divalent linking group, —x—. For example, divalent linking group can be -GGSG-, -GGGS- or -GGGGGS-.

[0119] In certain embodiments, the divalent linking group is not limited to any particular identity so long as the linking group —x— serves to covalently attach the Peptide P₁ and Peptide P₂ as shown in Formulae (I) and (II). The linking group —x— can contain one or more amino acid residues or a bifunctional chemical linking group, such as, for example, N-succinimidyl-3-(2-pyridyldithio)propionate (SPDP), m-maleimidobenzoyl-N-hydroxy-succimide ester (MBS), or 1-ethyl-3-(3-dimethylaminopropyl)carbodiimide (EDC). In certain embodiments, the linking group —x— can be a direct peptide or other covalent bond directly coupling Peptide P₁ and Peptide P₂. In certain embodiments where the linking group —x— contains amino acid residue, the linking group —x— can contain from 1 to about 5 amino acid residues or from 1 to about 3 amino residues. In certain embodiments, the linking group —x— can be cleavable or non-cleavable under physiological conditions.

[0120] The LEAPS™ heteroconjugates of Formulae (I) and (II) can be modified including modifications to the N- or C-terminal or the heteroconjugates. The LEAPS™ heteroconjugates described by Formulae (I) and (II) contain a sequence of amino acid residues consistent with the described Peptide P₁ and Peptide P₂. However, the N- or C-terminal of the described LEAPS™ heteroconjugates can be modified by any one or more of amidation or acylation, including myristoylation.

[0121] In certain embodiments, Peptides P₁ and P₂ and peptide heteroconjugates including peptides P₁ and P₂ include variants of any sequence presented herein in SEQ ID No.'s 1-1090. A variant is herein defined as a sequence wherein 1, 2, 3, 4 or 5 amino acid residues of any sequence disclosed herein are replaced with a different amino acid residue without affecting the ability of the LEAPS™ heteroconjugates to stimulate an immune response. In certain embodiment, variants have amino acid residues substituted in a conserved manner. In certain other embodiments, variants to SEQ ID No.'s 1-1090 have amino acid residues substituted in a non-conserved manner. Variants to SEQ ID No.'s 1-1090 include amino acid sequences where 1, 2, 3, 4 or 5 amino acid residues are deleted from the sequences and/or 1, 2, 3, 4 or 5 amino acid residues are added to the sequences. Variants include embodiments where combinations of conserved or non-conserved substitutions, additions and/or deletions are made to a sequence.

[0122] A conserved substitution is a substitution where an amino acid residue is replaced with another amino acid residue having similar charge, polarity, hydrophobicity, chemical functionality, size and/or shape. Substitution of an amino acid residue in any of the following groups with an amino acid residue from the same group is considered to be a conserved substitution: 1) Ala and Gly; 2) Asp and Glu; 3) Ile, Leu, Val and Ala; 4) Lys, Arg and His; 5) Cys and Ser; 6) Phe, Trp and Tyr; 7) Phe and Pro; 8) Met and Nle (norleucine); 9) Asn and Gln; and 10) Thr and Ser.

[0123] Table 1 shows exemplary antigens that can be employed as Peptide P₂ in certain embodiments. LEAPS™ heteroconjugates consistent with Formulae (I) and (II) can be formed by combining any permutation of ICBL peptide P₁ (e.g., CEL-1000, Peptide J and/or Peptide G, etc.) with an antigen (Peptides P₂) as presented in Table 1. Table 1 lists antigen sequences grouped by the condition or disease that such sequences are associated with. Specifically, the first column of Table 1 list the SEQ ID No. for the sequence presented in each row. The second column lists the disease, such as an autoimmune condition, for which the sequences presented in each row relate. The third column specifies the protein from which individual amino acid sequences are derived. The fourth column gives the abbreviation for which the sequence presented in each row can be referred to. For example, AB1-42 stands for ameloid β protein, residues 1-42, whereas J-AB1-42 indicates a LEAPS™ heteroconjugate having the ICBL Peptide J linked to ameloid β protein, residues 1-42. Also provided on Table 1 are example LEAPS™ heteroconjugates, where Peptide P₁ is Peptide J (SEQ ID No. 49) combined with an antigen Peptide P₂. The fifth Column specifies the core epitope sequence, if any, for the protein described in each row, and the sixth column specifies an extended epitope sequence associated with the protein described in each row. The seventh column indicates the range of amino acids from the described protein corresponding to the epitope sequence. The eighth column specifies an exemplary LEAPS™ heteroconjugate where the ICBL Peptide J (SEQ ID No. 49) is linked to one of the described antigens through a triglycine linker. Those skilled in the art will recognize that other LEAPS™ heteroconjugate constructs can be formed substituting for Peptide P₁ and Peptide P₂, where the examples on Table 1 are merely illustrative and are not limiting. The ninth column lists any know references describing the extended or core epitope sequences, if known. References are specified by a number corresponding to the list of references found at the end of this disclosure.

[0124] In addition to the antigen sequences disclosed in Table 1, U.S. Paten Publication 2006/0257420 A1 and U.S. Patent Publication U.S. Patent Publication 2011/0098444 A1 are expressly incorporated herein by reference.

TABLE 1
Autoimmune related antigens and example LEAPS ™ heteroconjugates

| Seq | | | | | | Amino | | |
|---|---|---|---|---|---|---|---|---|
| ID | | Protein | | | | acid | | |
| No. | Disease | Candidates | Abbreviation | Core epitope | Extended region | position | J LEAPS conjugate | Ref. |
| | Alzheimers dementia | ameloid b protein | | | NA | | NA | 3 |
| 51 | | | Ab1-42 | NA | DAEFRHDSGYEVHHQKLVFFAED | 1-42 | NA | 66 |
| | | | | | VGSNKGAIIGLMVGGVV | | | |
| 291 | | | J-Ab1-42 | NA | NA | NA | DLLKNGERIEKVEGGGDAEFRHDSGYEV | |
| | | | | | | | HHQKLVFFAEDVGSNKGAIIGLMVGGVV | |
| | Alzheimers dementia | ameloid b protein | Ab1-28 | | NA | | NA | |
| 53 | | | | NA | DAEFRHDSGYEVHHQKLVFFAEN | 1-28 | NA | 3, 4 |
| | | | | | VGSNK | | | |
| 293 | | | J-Ab1-28 | NA | NA | NA | DLLKNGERIEKVEGGGDAEFRHDSGYEV | |
| | | | | | | | HHQKLVFFAENVGSNK | |
| | Alzheimers dementia | ameloid b protein | | | NA | | NA | 3, 4 |
| 55 | | | Ab1-30 | NA | DAEFRHDSGYEVHHQKLVFFAEN | 1-30 | NA | |
| | | | | | VGSKAI | | | |
| 856 | | | J-Ab1-30 | NA | NA | NA | DLLKNGERIEKVEGGGDAEFRHDSGYEV | |
| | | | | | | | HHQKLVFFAENVGSKAI | |
| 960 | Alzheimers dementia | ameloid b protein | Ab1-15 | | DAEFRHDSGYEVHHQ | 1-15 | | 75, 76, 77 |
| 964 | | | J-Ab1-15 | | | | DLLKNGERIEKVEGGGDAEFRHDSGYEV | |
| | | | | | | | HHQ | |
| 961 | Alzheimers dementia | ameloid b protein | Ab12-33 | | KLVFFAEDVGSNKGAIIG | 16-33 | | 77, 78, 79 |
| 965 | | | J-Ab33 | | | | DLLKNGERIEKVEGGGKLVFFAEDVGSN | |
| | | | | | | | KGAIIG | |
| 962 | Rheumatoid Arthritis | Type II Cplagen | CII-354 | GARGLTGRPGDA | | 354-365 | | 80 |
| 963 | | | CII-350 | | PGLPGARGLTGRPGDAGPQG | 350-369 | | 81 |
| 966 | | | J-CII-350 | | | | DLLKNGERIEKVEGGGPGLPGARGLTGR | |
| | | | | | | | PGDAGPQG | |
| | Myocarditis | Myosin | | | NA | | NA | 5 |
| 749 | | | My4 | NA | KRKLEGDLKLTQESIMDLENDKQQL | 800-824 | NA | 40 |
| 857 | | | J-My4 | NA | NA | NA | DLLKNGERIEKVEGGGKRKLEGDLKLTQ | |
| | | | | | | | ESIMDLENDKQQL | |
| 72 | Myocarditis | cardiac antigen | CATI | NITEIADLTQK | NA | 121-131 | NA | 6 |
| 917 | | trponin I | CATIext | NA | AKVTKNITEIEADLTQKIFDLR | 116-136 | NA | 41 |
| 858 | | | J-CATIext | NA | NA | NA | DLLKNGERIEKVEGGGAKVTKNITEIEA | |
| | | | | | | | DLTQKIFDLR | |
| | Myocarditis | | | | NA | | NA | |
| 751 | | | BCKD-E2 | NA | VRRALMENNIKLSEVVGSG | 116-134 | NA | 7, 67 |
| | | | 116-134 | | | | | |
| 859 | | | J-BKD116 | NA | NA | NA | DLLKNGERIEKVEGGGVRRALMENNIKL | |
| | | | | | | | SEVVGSG | |
| | Myocarditis | | | | NA | | NA | 8 |
| 753 | | | LMM1.1 | NA | KEALISSLTRGKLTYTQQ | | NA | 40 |
| 860 | | | J-LMM1 | NA | NA | NA | DLLKNGERIEKVEGGGKEALISSLTRGK | |
| | | | | | | | LTYTQQ | |
| | Myocarditis | | | | NA | | NA | 8 |
| 755 | | | LMM33 | NA | SERVQLLHSQNTSLINQK | | NA | 40 |
| 861 | | | J-LMM33 | NA | NA | NA | DLLKNGERIEKVEGGGSERVQLLHSQNT | |
| | | | | | | | SLINQK | |
| 957 | Diabetes mellitus | Insulin Growth | IGF1R | SFGVVLWEI | NA | 1196-1204 | NA | 37, 29 |
| 958 | | Factor Receptor I | IGF1Rext | NA | YSDVWSFGVVLWEIATLAE | 1191- | NA | 42 |
| 862 | | | J-IGF1Rext | NA | NA | NA | DLLKNGERIEKVEGGGYSDVWSFGVVLW | |
| | | | | | | | EIATLAE | |
| | Diabetes | Bovine serum | | | NA | | NA | |
| 84 | | albumin | ABBOS 152 | NA | FKADEKKFWGKYLYE | 152 | NA | 13, 68 |
| 325 | | | J-ABBOS152 | NA | NA | NA | DLLKNGERIEKVEGGGFKADEKKFWGKY | |
| | | | | | | | LYE | |
| | Diabetes | Insulin beta chain | | | NA | | NA | |
| 86 | | | Insβ 9 | NA | SHLVEALYLVCGERG | 9 | NA | 14, 69 |
| 863 | | | J-Insβ9 | NA | NA | NA | DLLKNGERIEKVEGGGSHLVEALYLVCG | |
| | | | | | | | ERG | |
| | Diabetes | Heat shock protein | HSP277 | | NA | | NA | |
| 88 | | | | NA | VLGGGCALLRCIPALDSLTPANED | 277 | NA | 15, 70 |
| 864 | | | J-HSP277 | NA | NA | NA | DLLKNGERIEKVEGGGVLGGGCALLRCI | |
| | | | | | | | PALDSLTPANED | |
| | Diabetes | | | | NA | | NA | |
| 90 | | | RVEp151 | NA | EACVTSWLWSGEGAVFYRVDLH | 151 | NA | 16, 71 |
| | | | | | FINLGT | | | |
| 331 | | | J-RVEp151 | NA | NA | NA | DLLKNGERIEKVEGGGEACVTSWLWSGE | |
| | | | | | | | GAVFYRVDLHFINLGT | |
| | Diabetes | | | | NA | | NA | |
| 92 | | | RVEp87 | NA | MDFWCVEHDRPPPATPTSLTT | 87 | NA | 16, 71 |
| 341 | | | J-RVEp87 | NA | NA | NA | DLLKNGERIEKVEGGGMDFWCVEHDRPP | |
| | | | | | | | PATPTSLTT | |
| | Diabetes | Glutamic acid | | | NA | | NA | |
| 74 | | decarboxylase p65 | GAD65-247 | NA | NMYAMMIARFKMFPEVKEKGMA | 247-265 | NA | 9, 43 |
| | | | | | ALPRLIAFTSEHSHFSLK | | | |
| 317 | | | J-GAD65-247 | NA | NA | NA | DLLKNGERIEKVEGGGNMYAMMIARFKM | |
| | | | | | | | FPEVKEKGMAALPRLIAFTSEHSHFSLK | |
| | Diabetes | Glutamic acid | | | NA | | NA | |
| 76 | | decarboxylase p65 | GAD65-253 | NA | LARFKMFPEVKEKGMAALPRIAF | 253 | NA | 43 |
| | | | | | TSEHSHFSLK | | | |
| 317 | | | J-GAD65-253 | NA | NA | NA | DLLKNGERIEKVEGGGLARFKMFPEVKE | |
| | | | | | | | KGMAALPRIAFTSEHSHFSLK | |
| | Diabetes | Glutamic acid | | | NA | | NA | |
| 78 | | decarboxylase p65 | GAD65-524 | NA | SRLSKVAPVIKARMMEYGTT | 524 | NA | 10, 43 |
| 319 | | | J-GAD65-524 | NA | NA | NA | DLLKNGERIEKVEGGGSRLSKVAPVIKA | |
| | | | | | | | RMMEYG | |
| | Diabetes | Glutamic acid | | | NA | | NA | |
| 80 | | decarboxylase p65 | GAD65-506 | NA | IPPSLRYLEDEERMSRLSK | 506 | NA | 11, 43 |
| 865 | | | J-GAD65-506 | NA | NA | NA | DLLKNGERIEKVEGGGIPPSLRYLEDEE | |
| | | | | | | | RMSRLSK | |
| | Diabetes | Glutamic acid | | | NA | | NA | |
| 82 | | decarboxylase p65 | GAD65-201 | NA | NTNMFTYEIAPVFVLLEYVT | 201 | NA | 12, 43 |
| 866 | | | J-GAD65-201 | NA | NA | NA | DLLKNGERIEKVEGGGNTNMFTYEIAPV | |
| | | | | | | | FVLLEYVT | |
| | Diabetes | Glutamic acid | | | NA | | NA | |
| 98 | | decarboxylase p65 | GAD274 | NA | IAFTSEHSHFSLK | 274 | NA | 17, 43 |
| 339 | | | J-GAD274 | NA | NA | NA | DLLKNGERIEKVEGGGIAFTSEHSHFSLK | |
| 103 | Diabetes | Glutamic acid | | DRSTKVIDFH | NA | 127-136 | NA | 17 |
| 918 | | decarboxylase p65 | GAD122 | NA | VVKSFDRSTKVIDFHYPNEL | 122-141 | NA | 43 |
| 867 | | | J-GAD122 | NA | NA | NA | DLLKNGERIEKVEGGGVVKSFDRSTKVID | |
| | | | | | | | FHYPNEL | |
| | Diabetes | Glutamic acid | | | NA | | NA | |
| 449 | | decarboxylase p65 | GAD654 | NA | VSSVSSQFSDAAQASPSSHSS | 654-674 | NA | 17, 43 |
| 868 | | | J-GAD654 | NA | NA | NA | DLLKNGERIEKVEGGGVSSVSSQFSDAAQ | |
| | | | | | | | ASPSSHSS | |
| | Diabetes | Glutamic acid | | | NA | | NA | |
| 452 | | decarboxylase p65 | GAD797 | NA | MVWESGCTVIVMLTPLVEDGV | 797-717 | NA | 17, 43 |
| 869 | | | J-GAD797 | NA | NA | NA | DLLKNGERIEKVEGGGMVWESGCTVIVML | |
| | | | | | | | TPLVEDGV | |
| | Diabetes | Glutamic acid | | | NA | | NA | |
| 469 | | decarboxylase p65 | GAD854 | NA | FYLKNVQTQETRTLTQFHF | 854-872 | NA | 17, 43 |
| 870 | | | J-GAD854 | NA | NA | NA | DLLKNGERIEKVEGGGFYLKNVQTQETRT | |
| | | | | | | | LTQFHF | |
| | Rheumatoid arthritis | Collagen Type II | Human | | NA | | NA | |
| 812 | | | callogen Type | NA | TGGKPGIAGFKGEQGPKGEP | 254-273 | NA | 72 |
| 828 | | | CEL-2000 | NA | NA | NA | DLLKNGERIEKVEGGGTGGKPGIAGFKGE | |
| | | | | | | | QGPKGEP | |
| 1 | Rheumatoid Arthritis | collagen Type II | C-IIx | IAGFKGEQGPKGE | NA | 399-402 | NA | 1 |
| | | | | NA | | | NA | 72 |
| 347 | | | J-CIIx | NA | NA | NA | DLLKNGERIEKVEGGGIAGFKGEQGPKGE | |
| | Rheumatoid arthritis | Human collagen | | | NA | | NA | |
| 474 | | Type II | G54 | NA | DGEAGKPGKAGERGPPGPQG | 54-73 | NA | 18, 72 |
| 871 | | | J-G54 | NA | NA | NA | DLLKNGERIEKVEGGGDGEAGKPGKAGER | |
| | | | | | | | GPPGPQG | |
| | | Human collagen | | | NA | | NA | |
| 477 | Rheumatoid arthritis | Type II | K94 | NA | GLDGAKGEAGAPGVKGESGS | 94-113 | NA | 18, 72 |
| 872 | | | J-K94 | NA | NA | NA | DLLKNGERIEKVEGGGGLDGAKGEAGAPG | |
| | | | | | | | VKGESGS | |
| | Rheumatoid arthritis | Human collagen | | | NA | | NA | |
| 482 | | Type II | P544 | NA | ERGAAGIAGDKGDRGDVGEK | 544-573 | NA | 18, 72 |
| 873 | | | J-P544 | NA | NA | NA | DLLKNGERIEKVEGGGERGAAGIAGDKGD | |
| | | | | | | | RGDVGEK | |
| | Rheumatoid arthritis | Osteopontin | OPN | SLAYGLR | NA | 148-154 | NA | 19 |
| 487 | | | OPN143 | NA | DGRGDSLAYGLRSKSKK | 143-159 | NA | 44 |
| 874 | | | J-OPN143 | NA | NA | NA | DLLKNGERIEKVEGGGDGRGDSLAYGLR | |
| | | | | | | | SKSKK | |
| | Rheumatoid arthritis | naJP1 | | | NA | | NA | 20 |
| 490 | | | DNAJ1 | NA | QKRAAYKQYGHAAFE | | NA | 45 |
| 875 | | | J-DNAJ1 | NA | NA | NA | DLLKNGERIEKVEGGGQKRAAYKQYGHA | |
| | | | | | | | AFE | |
| | Rheumatoid arthritis | dnaJPV | | | NA | | NA | 20 |
| 493 | | | DNAJV | NA | ERAAYDQYGHAAFE | 461 | NA | 73 |
| 876 | | | J-DNAJV | NA | NA | NA | DLLKNGERIEKVEGGGERAAYDQYGHAA | |
| | | | | | | | FE | |
| 919 | Pemphigus vulgaris | Cadherin | Cad1 | GGGTGGGGG | NA | 394-403 | NA | 37.12 |
| 920 | | | Cad1ext | NA | CRVLGGGGTGGGGGLGGPG | 389-408 | NA | 46 |
| 877 | | | J-Cad1ext | NA | NA | NA | DLLKNGERIEKVEGGGCRVLGGGGTGGG | |
| | | | | | | | GGLGGPG | |
| 921 | Pemphigus vulgaris | Cadherin | Cad2 | AVAAVAAAG | NA | 19-27 | NA | 37.12 |
| 922 | | | Cad2ext | NA | CLGLLAVAAVAAAGANPAQ | 14-31 | NA | 47 |
| 878 | | | J-Cad1ext | NA | NA | NA | DLLKNGERIEKVEGGGCLGLLAVAAVA | |
| | | | | | | | AAGANPAQ | |
| | Pemphigus vulgaris | epidermal cell | | | NA | | NA | 21 |
| 496 | | adhesion molecule | DG342-358 | NA | SVKLSIAVKNKAEFHQS | 342-358 | NA | 48 |
| 782 | | desmoglein | | NA | NA | NA | DLLKNGERIEKVEGGGSVKLSIAVKNK | |
| | | | | | | | AEFHQS | |
| | Pemphigus vulgaris | epidermal cell | | | NA | | NA | 21 |
| 499 | | adhesion molecule | DG376-392 | NA | NVREGIAFRPASKFTV | 376-392 | NA | 48 |
| 879 | | desmoglein | J-DG376 | NA | NA | NA | DLLKNGERIEKVEGGGNVREGIAFRPA | |
| | | | | | | | SKFTV | |
| 2 | Multiple Sclerosis | Mylein basis | MBP | KNIVTPRT | NA | 118-125 | NA | |
| 959 | | protein | MBPext | NA | VVHFFKNIVTPRTPPPSQ | 113-130 | NA | 49 |
| 881 | | | J-MBPext | NA | NA | NA | DLLKNGERIEKVEGGGVVHFFKNIVTP | |
| | | | | | | | RTPPPSQ | |
| 524 | Multiple Sclerosis | Proteolipoprotien | PLP | HSLGKWLGHPDKF | NA | 139-151 | NA | 24 |
| 924 | | | PLPext | NA | LERVCHSLGKWLGHPDKFVGITY | 134-156 | NA | 50 |
| 883 | | | J-PLPext | NA | NA | NA | DLLKNGERIEKVEGGGLERVCHSLGKW | |
| | | | | | | | LGHPDKFVGITY | |
| 527 | Multiple Sclerosis | Peripheral Nerve | P2 | TEISFKLGQEF | NA | 61-71 | NA | 25 |
| 925 | | protein P2 | P256 | NA | STFKNTEISFKLGQEFEETTA | 56-76 | NA | 51 |
| 884 | | | J-P256 | NA | NA | NA | DLLKNGERIEKVEGGGSTFKNTEISFK | |
| | | | | | | | LGQEFEETTA | |
| | Multiple Sclerosis | Proteolipoprotein | PLP | | NA | | NA | |
| 549 | | | PLP175 | NA | IYFNTWTTCQSIAFPSKT | 175-192 | NA | 23, 50 |
| 886 | | | J-PLP175 | NA | NA | NA | DLLKNGERIEKVEGGGIYFNTWTTCQS | |
| | | | | | | | IAFPSKT | |
| | Multiple Sclerosis | myelin-associated | | | NA | | NA | |
| 552 | | oligodendrocytic | MOGP15 | NA | QKFSEHFSIHCCPPFTFLNSSKR | 15-36 | NA | 26, 52 |
| 887 | | | J-MOGP15 | NA | NA | NA | DLLKNGERIEKVEGGGQKFSEHFSIHC | |
| | | | | | | | CPPFTFLNSSKR | |
| | Multiple Sclerosis | myelin-associated | | | NA | | NA | |
| 555 | | oligodendrocytic | MOGP1-20 | NA | GQFRVIGPRHPIRALVGDEV | 1-20 | NA | 26, 52 |
| 888 | | | J-MOGP1-20 | NA | NA | NA | DLLKNGERIEKVEGGGGQFRVIGPRHP | |
| | | | | | | | IRALVGDEV | |
| | Multiple Sclerosis | myelin-associated | | | NA | | NA | 26 |
| 572 | | oligodendrocytic | MOGP31 | NA | NATGMEVGWYRPPFSRVVHL | 31-50 | NA | 52 |
| 889 | | | J-MOGP31 | NA | NA | NA | DLLKNGERIEKVEGGGNATGMEVGWYR | |
| | | | | | | | PPFSRVVHL | |
| | Multiple Sclerosis | myelin-associated | | | NA | | NA | 26 |
| 588 | | oligodendrocytic | MOGP91 | NA | SDEGGFTCFFRDHSYQEEAA | 91-110 | NA | 52 |
| 890 | | | J-MOGP91 | NA | NA | NA | DLLKNGERIEKVEGGGSDEGGFTCFFR | |
| | | | | | | | DHSYQEEAA | |
| 581 | Multiple Sclerosis | Proteolipoprotein | | | NA | | NA | |
| 891 | | | MOGP61 | NA | QAPETRGRTELLKDAIGEGK | 61-80 | NA | 26, 52 |
| | | | J-MOGP61 | NA | NA | NA | DLLKNGERIEKVEGGGQAPETRGRTEL | |
| | | | | | | | LKDAIGEGK | |
| | Multiple Sclerosis | Mylein basis | | | NA | | NA | |
| 597 | | protein | MBP85 | NA | ENPVVHFFKNIVTPR | 85-99 | NA | 27, 49 |
| 892 | | | J-MBP85 | NA | NA | NA | DLLKNGERIEKVEGGGENPVVHFFKNI | |
| | | | | | | | VTPR | |
| | Multiple Sclerosis | Proteolipoprotein | | | NA | | NA | |
| 606 | | | PLP184 | NA | QSLAFPSKTSASIGSL | 184-199 | NA | 28, 50 |
| 893 | | | J-PLP184 | NA | NA | NA | DLLKNGERIEKVEGGGQSLAFPSKTSA | |
| | | | | | | | SIGSL | |
| | Multiple Sclerosis | Proteolipoprotein | | | NA | | NA | |
| 609 | | | PLP190 | NA | SKTSASIGSKCADARMYGVL | 190-209 | NA | 28, 50 |
| 894 | | | J-PLP190 | NA | NA | NA | DLLKNGERIEKVEGGGSKTSASIGSKC | |
| | | | | | | | ADARMYGVL | |
| 612 | Multiple Sclerosis | myelin-associated | MOG97 | FFRDHSYQE | NA | 97-108 | NA | 29 |
| 950 | | oligodendrocytic | | NA | GGFTCFFRDHSYQEEAAME | 92-113 | NA | 52 |
| 895 | | | J-MOG97 | NA | NA | NA | DLLKNGERIEKVEGGGGGFTCFFRDHS | |
| | | | | | | | YQEEAAME | |
| | Multiple Sclerosis | Proteolipoprotein | | | NA | | NA | |
| 623 | | | PLP40 | NA | TGTEKLIETYFSKNYQDYEYL | 40-60 | NA | 50 |
| 897 | | | J-PLP40 | NA | NA | NA | DLLKNGERIEKVEGGGTGTEKLIETYF | |
| | | | | | | | SKNYQDYEYL | |
| | Multiple Sclerosis | myelin-associated | | | NA | | NA | |
| 636 | | oligodendrocytic | MOG37 | NA | VGWYRPPFSRVVHLYR | 37-52 | NA | 31, 52 |
| 899 | | | J-MOG37 | NA | NA | NA | DLLKNGERIEKVEGGGVGWYRPPFSRV | |
| | | | | | | | VHLYR | |
| | Multiple Sclerosis | myelin-associated | | | NA | | NA | 31 |
| 641 | | oligodendrocytic | MOG145 | NA | VFLCLQYRLRGKLRAE | 145-160 | NA | 52 |
| 900 | | | J-MOG145 | NA | NA | NA | DLLKNGERIEKVEGGGVFLCLQYRLRG | |
| | | | | | | | KLRAE | |
| | Uveoretinitis | interphotoreceptor | IRBP | | NA | | NA | 32 |
| 653 | | retinoid binding | | NA | DGSSWEGVGVVPDV | 1202-1215 | NA | 53 |
| 901 | | protein | J-IRBP | NA | NA | NA | DLLKNGERIEKVEGGGDGSSWEGVGVV | |
| | | | | | | | PDV | |
| | Uveoretinitis | interphotoreceptor | IRBP | | NA | | NA | |
| 664 | | retinoid binding | IRBP1 | NA | GPTHLFQPSLVLDMAKVLLD | 1-20 | NA | 33, 53 |
| 786 | | protein | J-IRBP1 | NA | NA | NA | DLLKNGERIEKVEGGGGPTHLFQPSLV | |
| | | | | | | | LDMAKVLLD | |
| 3 | Thrombosis | Beta-2- | GP1 | GDKVSFFCKNKEKKC | NA | 274-288 | NA | 2 |
| 927 | | Glycoprotein 1 | GP1ext | NA | NGMLHGDKVSFFCKNKEKKCSYTED | 269-293 | NA | 54 |
| 902 | | | J-GP1ext | NA | NA | NA | DLLKNGERIEKVEGGGNGMLHGDKVSF | |
| | | | | | | | FCKNKEKKCSYTED | |
| | Myastmenia Gravis | acetyl | | | NA | | NA | |
| 19 | | cholinereceptor | AchR 129 | NA | EIIVTHFPFDEQNCSMK | 129-145 | NA | 34, 55 |
| 355 | | Receptor | J-ArchR129 | NA | NA | NA | DLLKNGERIEKVEGGGEIIVTHFPFDE | |
| | | | | | | | QNCSMK | |
| 737 | Myastmenia Gravis | acetyl | | VIVELIPSTSSAV | NA | 259-271 | NA | 34, 35 |
| 951 | | cholinereceptor | AchR 259 | NA | TVFLLVIVELIPSTSSAVPLIGK | 254-276 | NA | 55 |
| 903 | | | J-ArchR259 | NA | NA | NA | DLLKNGERIEKVEGGGTVFLLVIVELI | |
| | | | | | | | PSTSSAVPLIGK | |
| | Myastmenia Gravis | acetyl | | NA | NA | | NA | |
| 738 | | cholinereceptor | AchR 195 | NA | DTPYLDITYHFVMQRLPL | 195-212 | NA | 35, 55 |
| 904 | | Receptor | J-ArchR195 | NA | NA | NA | DLLKNGERIEKVEGGGDTPYLDITYHF | |
| | | | | | | | VMQRLPL | |
| | Psorasis | | Pso P27 | | NA | | NA | 36 |
| 774 | | | | NA | SVDRSGNVHHQFQKLTLE | 18 Jan. | NA | 74 |
| 804 | | | | NA | NA | NA | DLLKNGERIEKVEGGGSVDRSGNVHHQ | |
| | | | | | | | FQKLTLE | |
| 947 | Prenicious Anemia | H⁺K⁺ATPase | H/KATPase | EEEAEEEA | NA | 35-43 | NA | 37.17 |
| 928 | | H⁺K⁺ATPase | H/KATPase | NA | NYLADEEEAEEEARVTVV | 30-48 | NA | 56 |
| 906 | | | J-ATPase | NA | NA | NA | DLLKNGERIEKVEGGGNYLADEEEAEE | |
| | | | | | | | EARVTVV | |
| 948 | Autoimmune | Cytochrome p450 | Cytp450-1 | SLLILLLLL | NA | 23-31 | NA | 37.33 |
| 929 | Hepatitis | | | NA | ILQVTSLLILLLLLIKAAQ | 18-36 | NA | 57 |
| 907 | | | J-p450 | NA | NA | NA | DLLKNGERIEKVEGGGILQVTSLLILL | |
| | | | | | | | LLLIKAAQ | |
| 930 | Systemic Lupus | RNA polymerase | RNAp.1 | PGGYFIVKG | NA | 106-115 | NA | 37.7.1 |
| 931 | erythematosus | | | NA | ECPLDPGGYFIVKGVEKVI | 101-120 | NA | 58 |
| 908 | | | J-RNAP.1 | NA | NA | NA | DLLKNGERIEKVEGGGECPLDPGGYFI | |
| | | | | | | | VKGVEKVI | |
| 949 | Systemic Lupus | RNA polymerase | RNAP.2 | GEMERDCLI | NA | 990-998 | NA | 37.7.1 |
| 932 | erythematosus | | | NA | GGLRLGEMERDCLIGYGAS | 985-1003 | NA | 58 |
| 909 | | | J-RNAP.2 | NA | NA | NA | DLLKNGERIEKVEGGGGGLRLGEMERD | |
| | | | | | | | CLIGYGAS | |
| 933 | Systemic Lupus | Histone | Hist1 | APAAPAAPA | NA | 6-13 | NA | 37.7.2 |
| 934 | erythematosus | | | NA | MSETAPAAPAAPAPAEKT | 1-18 | NA | 59 |
| 910 | | | J-Hist1 | NA | NA | NA | DLLKNGERIEKVEGGGMSETAPAAPAA | |
| | | | | | | | PAPAEKT | |
| 935 | Systemic Lupus | anRNPs | anRNP.1 | GGRGGGGGG | NA | 195-203 | NA | 37.7.3 |
| 936 | erythematosus | | | NA | GGGFRGGRGGGGGGFRGGR | 190-208 | NA | 60 |
| 911 | | | J-RNO1 | NA | NA | NA | DLLKNGERIEKVEGGGGGGFRGGRGGG | |
| | | | | | | | GGGFRGGR | |
| 937 | Rheumatic Fever | Myosin | My2 | LDSKSLKI | NA | 794-802 | NA | 37.20 |
| 938 | | | | NA | IPKNLLDSKSLKIISMTL | 789-807 | NA | 61 |
| 912 | | | J-My2 | NA | NA | NA | DLLKNGERIEKVEGGGIPKNLLDSKSL | |
| | | | | | | | KIISMTL | |
| 939 | Rheumatic Fever | Myosin | My3 | NRIIHRDVK | NA | 150-158 | NA | 37.20 |
| 940 | | | | NA | QHLHNNRIIHRDVKGNNIL | 145-163 | NA | 62 |
| 913 | | | J-My3 | NA | NA | NA | DLLKNGERIEKVEGGGIQHLHNNRIIH | |
| | | | | | | | RDVKGNNIL | |
| 941 | Graves disease | Thyroid hormone | T4T | SKSRSRSRS | NA | 28-36 | NA | 37.13 |
| 942 | | | | NA | RSRSFSKSRSRSRSLSRSR | 23-41 | NA | 63 |
| 914 | | | J-T4R | NA | NA | NA | DLLKNGERIEKVEGGGIRSRSFSKSRS | |
| | | | | | | | RSRSLSRSR | |
| 943 | Systemic sclerosis | DNA | DNAtp1 | GGKDAASPR | NA | 812-820 | NA | 37.15 |
| 944 | | topoisomerase | | NA | GTRLHGGKDAASPRYIFTM | 807-825 | NA | 64 |
| 915 | | | J-DNAtp1 | NA | NA | NA | DLLKNGERIEKVEGGGIGTRLHGGKDA | |
| | | | | | | | ASPRYIFTM | |
| 945 | Goodoature's | Type IV Collaagen | C-IVp1 | GAVGPAGPP | NA | 192-200 | NA | 37.18 |
| 946 | syndrome | | | NA | APGFPGAVGPAGPPGLQGP | 187-205 | NA | 65 |
| 916 | | | J-CIVp1 | NA | NA | NA | DLLKNGERIEKVEGGGIAPGFPGAVGP | |
| | | | | | | | AGPPGLQGP | |

[0125] Alternatively, the invention contemplates a variable immunomodulatory peptide construct having the Formula (III)

P₃-x-P₄ (III)

[0126] where P3 is a peptide construct comprised of X1 to X14 said peptide P3 being associated with an antigen from Table 1, and P4 is a peptide construct comprised of X1 to X14 causing a Th1 directed immune response by said set or subset of T cells to which the peptide P3 is attached or which binds to a dendritic cell or T cell receptor causing said set or subset of DC or T cells to which the peptide P3 is attached to initiate and complete, an immune response.

[0127] Alternatively, the invention contemplates a variable immunomodulatory peptide construct having the formula (IV)

P₅-x-P₆ (IV)

where P₅ is a peptide construct comprised of X₁ to X₁₄ said peptide P₅ being associated with an antigen from Table 1, and P₆ is a peptide construct comprised of X₁ to X₁₄ causing a TₕI directed immune response by said set or subset of T cells to which the peptide P₅ is attached or which binds to a T cell receptor causing said set or subset of T cells to which the peptide P₅ is attached to initiate an immune response, such that X₁ to X₁₀ and X₁₄ describe a group of amino acids based on their features and X₁₁ to X₁₃ describe modifications to the peptide construct, wherein
[0128] X₁ is selected from the group consisting of Ala and Gly,
[0129] X₂ is selected from the group consisting of Asp and Glu,
[0130] X₃ is selected from the group consisting of He, Leu and Val,
[0131] X₄ is selected from the group consisting of Lys, Arg and His,
[0132] X₅ is selected from the group consisting of Cys and Ser,
[0133] X₆ is selected from the group consisting of Phe, Trp and Tyr,
[0134] X₇ is selected from the group consisting of Phe and Pro,
[0135] X₈ is selected from the group consisting of Met and Nle,
[0136] X₉ is selected from the group consisting of Asn and Gln,
[0137] X₁₀ is selected from the group consisting of Thr and Ser,
[0138] X₁₁ is Gaba^{Z} where X₂X₃, X₃X₂, X₂X₃, X₃X₂, X₃X₃, or X₂X₂ can be substituted with X₁₁;
[0139] X₁₂ is selected from the group consisting of acetyl, propionyl group, D glycine, D alanine and cyclohexylalanine;
[0140] X₁₃ is 5-aminopentanoic where any combination of 3 to 4 amino acids of X₂ and X₃ can be replaced with X₁₃;
[0141] X₁₄ is selected from the group consisting of X₁, X₂, X₃, X₄, X₅, X₆, X₇, X₈, X₉ and X₁₀; and

[0142] x is a direct bond or linker for covalently bonding P₅ and P₆. For example, a variable immunomodulatory peptide construct of formulae (III)-(IV) can contain a peptide causing a T_{b}2 directed immune response related to peptide J (SEQ ID No. 49), such as X₂X₃X₃X₄X₉X₁X₂X₄X₃X₂X₄X₃X₂ (SEQ ID No. 1091). One having skill in the art would recognize that each of X₁ to X₁₄ represents a group of amino acids having similar charge, polarity, hydrophobicity, chemical functionality, size and/or shape. As such, one having skill in the art will recognize that a variable immunomodulatory peptide can be identified by substituting a specific amino acid residue in any sequence disclosed herein with the corresponding group X₁ to X₁₄ including and representing the properties of that specific residue. For example, one having skill in the art will recognized that a Gly residue can be represented by group X₁, and Trp residue can be represented by X₆ and an Arg residue can be represented by group X₄. As such, one having skill in the art will be able to unambiguously assign the tripeptide GWR as X₁X₆X₄. Similarly, one having skill in the art will be able to unambiguously assign any of the sequences disclosed herein to a variable immunomodulatory peptide construct having residue represented by X₁ to X₁₄. For peptide ENVGSNK (SEQ ID No. 59) can be converted to the variable immunomodulatory peptide X₂X₉X₃X₁X₈X₉X₄ (SEQ ID No. 60) that can be incorporated into an immunomodulatory peptide construct.

[0143] Table 2 shows exemplary antigens that can be employed as peptide P₂ in certain embodiments for the treatment of cancer. LEAPS™ heteroconjugates consistent with Formulae (I) and (II) can be formed by combining any permutation of ICBL peptide including CEL-1000. Peptide J and/or Peptide G (Peptides P₁) with an antigen peptide (Peptide P₂) as presented in Table 2. Table 2 lists antigen sequences grouped by class of cancer that such sequences are associated with. Specifically, the first column of Table 2 list the SEQ ID No. for the sequence presented in each row. The second column lists the disease or cancer for which the sequencers presented in each row relate. The third column specifies the protein from which individual amino acid sequences are derived. The fourth column gives the abbreviation for which the sequence presented in each row can be referred to. For example, AFP stands for alpha fetoprotein, whereas J-AFP indicates a LEAPS™ heteroconjugate having the ICBL Peptide J linked to AFP. Also provided on Table 2 are example LEAPS™ heteroconjugates where Peptide P₁ is Peptide J (SEQ ID No. 49) combined with an antigen Peptide P₂. The fifth column specifies the core epitope sequence, if any, for the protein described in each row, and the sixth column specifies an extended epitope sequence associated with the protein described in each row or alternatively a LEAPS™ heteroconjugate containing Peptide J (SEQ ID No. 49). The seventh column indicates the range of amino acids from the described protein corresponding to the epitope sequence. The eighth column lists any know references describing the extended or core epitope sequences, if known. References are specified by a number corresponding to the list of references found at the end of this disclosure.

[0144] The LEAPS™ heteroconjugates presented on Table 2 are conjugates where Peptide P₁ is Peptide J (SEQ ID No. 49) combined with an antigen Peptide P₂. Those skilled in the art will recognize that other constructs can be formed substituting for Peptide P₁ and Peptide P₂ where the examples on Table 2 are merely illustrative and are not limiting.

TABLE 2
Cancer related sequences and example LEAPS ™ heteroconjugates

| Seq | | | | | | | |
|---|---|---|---|---|---|---|---|
| ID | | | | | | | |
| No. | Disease | Protein | Abbreviation | Core epitope | Extended region or LEAPS ™ | Position | Reference |
| 967 | Colorectal | | NSFL1 (p97) | ASSSILINESEPTTNIQIR | NA | 283-301 | 110 |
| | cancer | | cofactor (p47) | | | | |
| 1045 | | | J-NSFL1.1ext | NA | DLLKNGERIEKVEGGGASSSILINESEPTTNIQIR | NA | |
| 968 | Colorectal | ATP-binding | ATP-bcsF | FAALDEEEDKEEEIIK | NA | 193-209 | 110 |
| | cancer | cassette, sub | | | | | |
| | | family F | | | | | |
| 1046 | | | J-ATP-bcsFpext | NA | DLLKNGERIEKVEGGGQLVNMCMNPDPEK | NA | |
| 969 | Colorectal | | Nek7 | QLVNMCMNPDPEK | NA | 269-281 | 110 |
| | cancer | | | | | | |
| 1047 | | | J-Nek7ext | NA | DLLKNGERIEKVEGGGQLVNMCMNPDPEK | NA | |
| 970 | Colon | carcinoembryonic | CEA1 | YLSGANLNL | NA | 653-667 | 90 |
| 1013 | cancer | antigen | CEA1ext | NA | PPDSSYLSGANLNLSCHSA | 548-672 | 97 |
| 1048 | | | J-CEA1ext | NA | DLLKNGERIEKVEGGGPPDSSYLSGANLNLSCHSA | NA | |
| 971 | Colon | carcinoembryonic | CEA2 | YACFVSNLATGRNNS | NA | 653-667 | Kobatyashi |
| 1014 | Cancer | antigen | CEA2ext | NA | NNNGTYACFSNLATGRNNSIVKSI | 648-672 | 128 |
| 1049 | | | J-CEA2ext | NA | DLLKNGERIEKVEGGGNNNGTYACFVSNLATGR | NA | |
| | | | | | NNSIVKI | | |
| 972 | Liver | Alpha fetoprotein | AFP | GVALQTMKQ | NA | 542-550 | 83 |
| 1015 | cancer | | AFPext | NA | DLCQAGVALQTMKQEFLIN | 537-555 | 96 |
| 1050 | | | J-AFPext | NA | DLLKNGERIEKVEGGGDLCQAGVALQTMKQEFLIN | NA | |
| 973 | Breast | Her2/Neu protein | Her2/Neu1 | KIFGSLAFL | NA | 369-337 | 85, 88 |
| 1016 | cancer | | Her2Neu1ext | NA | FAGCKKIFSLAFLPESFD | 364-382 | 98 |
| 1051 | | | J-HerNeu1ext | NA | DLLKINGERIEKVEGGGFAGCKKIFGSLAFLPESFD | NA | |
| 974 | Breast | Her2/Neu protein | Her2/Neu2 | RLLQETELV | NA | 689-697 | 89, 88 |
| 1017 | cancer | | Her2Neu2ext | NA | KYTMRRLLQETELVEPLTP | 684-702 | 98 |
| 1052 | | | J-Her2Neu2ext | NA | DLLKNGERIEKVEGGGKYTMRRLLQETELVEPLTP | NA | |
| 975 | Breast | Her2/Neu protein | Her2/Neu3 | ALCRWGLLL | NA | 5-13 | 109 |
| 1018 | cancer | | Her2Neu3ext | NA | MELAALCRWGLLLALLPP | 1-18 | 115 |
| 1053 | | | J-Her2Neu3ext | NA | DLLKNGERIEKVEGGGMELAALCRWGLLLALLPP | NA | |
| 976 | Breast | Her2/Neu protein | Her2/Neu4 | HLYQGCQVV | NA | 48-56 | 109 |
| 1019 | cancer | | Her2Neu4ext | NA | LDMLRHLYQGCQVVQGNLE | 43-61 | 115 |
| 1054 | | | J-Her2Neu4ext | NA | DLLKNGERIEKVEGGGLDMLRHLYQGCQVVQGNLE | NA | |
| 977 | Breast | Her2/Neu protein | Her2/Neu6 | YLVPQQGFFC | NA | 1023-1032 | 109 |
| 1020 | cancer | | Her2Neu6ext | NA | VDAEEYLVPQQGFFCPDPAP | 1018-1037 | 116 |
| 1055 | | | J-Her2Ne6ext | NA | DLLKNGERIEKVEGGGVDAEEYLVPQQGFFCPDPAP | NA | |
| 978 | Breast | | Her2/Neu7 | VPIKWMALWSILRRRF | NA | 183-198 | Hilthold |
| 1021 | | | Her2Neu7ext | NA | ADGGKVPIKWMALWSILRRRFTHQSD | 178-203 | 120 |
| 1056 | | | J-Her2Neu7ext | NA | DLLKNGERIEKVEGGGADGGKVPIKWMALWSIL | NA | |
| | | | | | RRRFTHQSD | | |
| 979 | Breast | Mucin 1 | Muc1 | STAPPAHGV | NA | NA | 84 |
| 1022 | Ovarian | | Muc1ext | NA | STAPPAHGVSTAPPAHGV | NA | 105 |
| 1057 | | | J-Muc1ext | NA | DLLKNGERIEKVEGGGSTAPPAHGVSTAPPAHGV | NA | |
| 980 | Breast | Mucin 2 | Muc2 | LLNQLQVNL | NA | 467-475 | |
| 1023 | Ovarian | | Muc2ext | NA | SDGVLLNQLQVNLPHVTA | 462-480 | 106 |
| 1058 | | | J-Muc2ext | NA | DLLKNGERIEKVEGGGSDGSVLLNQLQVNLPHVTA | NA | |
| 981 | Cervical | E7 protein of | HPV16E7.1 | DRAHYNIVTFCCK | NA | 48-60 | 87 |
| 1024 | cancer | human papiloma | | NA | GQAEPDRAHYNIVTFCCKCDSTL | 43-65 | 99 |
| | | virus Type 16 | | | | | |
| 1059 | | | J-HPV16E7.1ext | NA | DLLKNGERIEKVEGGGGQAEPDRAHYNIVTFCC | NA | |
| | | | | | KCDSTL | | |
| 982 | Cervical | HPV 52 | HPV 52 L1.1 | STYKNENFK | NA | 383-391 | 114 |
| 1025 | Cancer | | HPV52L1.1ext | NA | EVKKESTYKNENFKEYLRH | 378-396 | 118 |
| 1060 | | | J-HPV52L1.1ext | NA | DLLKNGERIEKVEGGGEVKKESTYKNENFKEYLRH | NA | |
| 983 | Cervical | HPV 52 | L1.2 | SAPRTSTKK | NA | 516-524 | 114 |
| 1026 | Cancer | | L1.2ext | NA | KRPASSAPRT STKKKKVKR | 511-529 | 118 |
| 1061 | | | J-HPV52L1.2ext | NA | DLLKNGERIEKVEGGGKRPASSAPRT | NA | |
| | | | | | STKKKKVKR | | |
| 984 | Cervical | HPV52 | L1.3 | TSESQLFNK | NA | 332-340 | 114 |
| 1027 | Cancer | | L1.3ext | NA | SGSMVTSESQLFNKPYWLQ | 327-345 | 118 |
| 1062 | | | J-HPV52L1.3ext | NA | DLLKNGERIEKVEGGGSGSMVTSESQLFNKPYWLQ | NA | |
| 985 | Cervical | HPV 16 | HPV E6.1 | KTLEERVKK | NA | 86-94 | 114 |
| 1028 | Cancer | | HPV16E6.1ext | NA | YSLYGTLEERVKKPLSEI | 81-99 | 119 |
| 1063 | | | J-HPV16E6.2ext | NA | DLLKNGERIEKVEGGGSGSYSLYGKTLEERVKKP | NA | |
| | | | | | LSIE | | |
| 986 | Cervical | | HPV E6.2 | RLQCVQCKK | NA | 27-35 | 114 |
| 1029 | Cancer | | HPV16E6.2ext | NA | SVHEIRLQCVQCKKELQRR | 22-40 | 119 |
| 1064 | | | J-HPV16E6.2ext | NA | DLLKNGERIEKVEGGGSGSVHEIRLQCVQCKKEL | NA | |
| | | | | | QRR | | |
| 987 | Cervical | HPV16 | HPV E6.3 | ILIRCIICQ | NA | 99-107 | 114 |
| 1030 | Cancer | | HPV16E6.3ext | NA | KPLSEILIRCIICQTPLCP | 94-112 | 119 |
| 1065 | | | J-HPV16E6.3ext | NA | DLLKNGERIEKVEGGGSKPLSEILIRCIICQTPLCP | NA | |
| 988 | Cervical | HPV16 | HPV E7.2 | YMLDLQPETT | NA | 11-20 | |
| 1031 | Cancer | | HVP16E7.2ext | NA | PTHEYMLDLQPETTDLYCY | 6-25 | 121 |
| 1066 | | | J-HPV16E7.2est | NA | DLLKNGERIEKVEGGGPTLHEYMLDLQPETTDLYCY | NA | |
| 989 | Several | Oncofetal antigen | OFA-ILR1 | LLAARAIVAI | NA | 59-68 | 93 |
| 1032 | | immature lamin | OFA-ILR1ext | NA | TWEKLLLAARAIVAIENPAD | 54-73 | 100 |
| 1067 | | receptor | J-OFA-ILR1ext | NA | DLLKNGERIEKVEGGGTWEKLLLAARAIVAIENPAD | NA | |
| 990 | Several | Oncofetal antigen | OFA-ILR2 | ALCNTDSPL | NA | 146-154 | 93 |
| 1033 | | immature lamin | OFA-ILR2ext | NA | NLPTIALCNTDSPLRYVDI | 141-159 | 100 |
| 1068 | | receptor | J-OFA-ILR2ext | NA | DLLKNGERIEKVEGGGNLPTIALCNTDSPLRYVDI | NA | |
| 991 | Prostate | Prostatic acid | PAP1 | ILLWQPIPV | NA | 135-143 | 91 |
| 1034 | Cancer | phosphatase | PAP1ext | NA | SIWNPILLWQPIPVHTVPL | 130-148 | 103 |
| 1069 | | | J-PAP1ext | NA | DLLKNGERIEKVEGGGSIWNPILLWQPIPVHTVPL | NA | |
| 992 | Prostate | Prostate Specific | PSA1 | KLQCVDLHV | | 146-154 | 91 |
| 1035 | Cancer | Antigen | PSA1ext | NA | FLTPKKLQCVDLHVISNDV | 141-159 | 104 |
| 1070 | | | J-PSA1ext | NA | DLLKNGERIEKVEGGGFLTPKKLQCVDLHVISNDV | NA | |
| 993 | Prostate | | PSA Peptide2 | FLRPGDDSSHDLNLLR | NA | 110-125 | 113 |
| 1071 | | | J-PSA1 | NA | DLLKNGERIEKVEGGGFLRPGDDSSHDLNLLR | NA | |
| 994 | Prostate | | PAP2 | FQELESETLKSEEFQK | NA | 164-179 | 113 |
| 1072 | | | J-PAP2ext | NA | DLLKNGERIEKVEGGGFQELESETLKSEEFQK | NA | |
| 995 | Prostate | | Periostin pep | GLESNVNVELLNALHSHMNKR | NA | 152-173 | 113 |
| 1073 | | | J-Perpep | NA | DLLKNGERIEKVEGGGGLESNVNVELLNALHSHMNKR | NA | |
| 996 | Melanoma | Melanoma- | MA2 | REPVTKAEML | NA | 127-136 | 91, 95 |
| 1036 | | associated | MA2ext | NA | LLKYRAREPVTKAEMLGSVVGNWQ | 122-141 | 101 |
| | | antigen 2 | | | | | |
| 1074 | | | J-MA2ext | NA | DLLKNGERIEKVEGGGLLKYRAREPVTKAEMLG | NA | |
| | | | | | SVVGNWQ | | |
| 997 | Melanoma | Melanoma- | MA3 | EVDPIGHLY | NA | 168-176 | 86, 82 |
| 1037 | | associated | MA3 ext | NA | GIELMEADPIGHLYIFATC | 163-181 | 102 |
| | | antigen 3 | | | | | |
| 1075 | | | J-MA3ext | NA | DLLKNGERIEKVEGGGIELMEADPIGHLYIFATC | NA | |
| 998 | Melanoma | Tyrosinase-Related | TRP2 | SVYDFFVWL | NA | 180-188 | 92 |
| 1038 | | Protein 2 | TRP2ext | NA | FANCSSVYDFFVWLHYYSV | 175-193 | 107 |
| 1076 | | | J-TRP2ext | NA | DLLKNGERIEKVEGGGFANCSSVYDFFVWLHYYSV | NA | |
| 999 | Melanoma | Tyrosinase-Related | TRP1 | MSLQRQFLR | NA | NA | 108 |
| 1039 | | Protein 2 | TRP1ext | NA | MSLQRQFLRTQLWD | NA | 108 |
| 1077 | | | J-TRP1ext | NA | DLLKNGERIEKVEGGGMSLQRQFLRTQLWD | NA | |
| 1000 | Lung cancer | C3dg Complement | C3dg1 | AGDFLEANYMNLQR | NA | 1172-1185 | 111 |
| 1040 | | | C3dg1ext | NA | GSITAGDFLEANYMNLQRSYTVA | 1167-1190 | 117 |
| 1078 | | | J-C3dg1ext | NA | DLLKNGERIEKVEGGGSITKAGDFLEANYMNLQR | NA | |
| | | | | | SYTVA | | |
| 1001 | Lung | C3dg Complement | C3dg2ext Complement | ILLQGTPVAQMTEDAVDAER | NA | 980-999 | 111, 117 |
| 1079 | cancer | | J-C3dg2ext | NA | DLLKNGERIEKVEGGGILLQGTPVAQMTEDAVDAER | NA | |
| 1002 | Lung | C3dg Complement | C3dg3 | KGYTQQLAFR | NA | 1051-1060 | 111 |
| 1041 | cancer | | C3dg3ext | NA | LELIKKGYTQQLAFRQPSSA | 1046-1065 | 117 |
| 1080 | | | J-C3dg3ext | NA | DLLKNGERIEKVEGGGKGYTQQLAFR | NA | |
| 1003 | Lung | C3dg Complement | C3dg4 | QPSSAFAAFVKR | NA | 1061-1072 | 111 |
| 1042 | cancer | | C3dg4ext | NA | QLAFRQPSSAFAAFVKRAPSTW | 1056-1077 | 117 |
| 1081 | | | J-C3dg4ext | NA | DLLKNGERIEKVEGGGQLAFRQPSSAFAAFVKRA | NA | |
| | | | | | PSTW | | |
| 1004 | Lung | C3dg Complement | C3dg4 | WLNEQR | NA | 1255-1260 | 111 |
| 1043 | cancer | | C3dg4ext | NA | PPVVRWLNEQRYYGGG | 1250-1265 | 117 |
| 1082 | | | J-C3dg4ext | NA | DLLKNGERIEKVEGGGPPVVRWLNEQRYYGGG | NA | |
| 1005 | Lung cancer | | C9 PEPTIDE a | FTPTENKAEQCCEETASSISLHG | NA | 243-267 | 111, 129 |
| 1083 | | | J-C9a | NA | DLLKNGERIEKVEGGGFTPTENKAEQCCEETAS | NA | |
| | | | | | SISLHG | | |
| 1006 | Lung cancer | | C9 PEPTIDE b | QYTGTSYDPELTESSGSASHIDC | NA | 22-44 | 111, 129 |
| 1084 | | | J-C9b | NA | DLLKNGERIEKVEGGGQYTGTSYDPELTESSGSA | NA | |
| | | | | | SHIDC | | |
| 1007 | Gastric | Pepsinogen | pep1 | FLKKHNLNPARKYFPQW | NA | 41-57 | 111, 130 |
| | (Stomach) | | | | | | |
| | Cancer | | | | | | |
| 1085 | | | J-Pep1 | NA | DLLKNGERIEKVEGGGFLKKHNLNPARKYFPQW | NA | |
| 1008 | Gastric | Pepsinogen | pep2 | FLKKHLNPARKYFPQWEA | NA | 41-59 | 111, 130 |
| | (Stomach) | | | | | | |
| | Cancer | | | | | | |
| 1086 | | | J-Pep2 | NA | DLLKNGERIEKVEGGGFLKKHLNPARKYFPQWEA | NA | |
| 1009 | Gastric | Leucine zipper | LZpf | ETKKTEDRFVPSSSKSEGKKSR | NA | 447-476 | 112, 131 |
| | (Stomach) | protein | | EQPSVLSR | | | |
| | Cancer | | | | | | |
| 1087 | | | J-LZpf | NA | DLLKNGERIEKVEGGGETKKTEDRFVPSSSKSEG | NA | |
| | | | | | KKSREQPSVLSR | | |
| 1010 | Gastric | albumin fragment | | [sequence omitted] | NA | 25-48 | 112, 132 |
| | (Stomach) | | | LVL | | | |
| | Cancer | | | | | | |
| 1088 | | | J-Albfrag | NA | DLLKNGERIEKVEGGGDAHKSEVAHRFKDLGEENF | NA | |
| | | | | | KALVL | | |
| 1011 | Gastric | alantitryposin | alTry1 | SIPPEVKFNKPFVFLIEQNTKS | NA | 369-404 | 112, 132 |
| | (Stomach) | | | PLFMGKVVNPTQK | | | |
| | Cancer | | J-alTry1 | NA | DLLKNGERIEKVEGGGSIPPEVKFNKPFVFLIEQN | NA | |
| 1089 | | | | | TKSPLFMGKVVNPTQK | | |
| 1012 | Testes Tumor | | NY-ESQ1 | LSLLMWITQCFLPVFLA | NA | 156-172 | Zeng, 134 |
| 1044 | | | NY-ESQ11 | NA | SCLQQLSLLMWITQCLFLPVFLAQPPSG | 151-177 | 134 |
| 1090 | | | J-ESQ1 | NA | DLLKNGERIEKVEGGGSCLQQLSLLMWITQCLFLP | NA | |
| | | | | | VFLAQPPSG | | |

### Reversal Sequences

[0145] Embodiments also contemplate reversal sequences where the order of amino acids in Peptides P₁, P₂, P₃, P₄, P₅ and P₆ is reversed from N-term to C-terminus. For example peptide J has the sequence DLLKNGERIEKVE (SEQ ID No. 49). The reversal sequence of SEQ ID No. 49 has the sequence from N-terminus to C-terminus of EVKEIREGNKLLD. The reversal sequence for any ICBL disclosed herein is envisioned for inclusion in a LEAPS™ heteroconjugate as described herein. Further, the non-reversal sequence for an ICBL can be conjugated with an antigen sequence from Table 1 or with a reversal antigen sequence from Table. The reversal sequence for SEQ ID No. 1 is EGKPGQEGKFGAI, such that LEAPS™ heteroconjugates contemplated in certain embodiments include DLLKNGERIEKVEGGGEGKPGQEGKFGAI and DLLKNGERIEKVEGGGIAGFKGEQGPKGE, were Peptide J (SEQ ID No. 49) is conjugate with the reversal sequence of SEQ ID No. 1 or the non-reversal sequence of SEQ ID No. 1, respectively. Further, the reversal sequence for an ICBL can be conjugated with an antigen sequence from Table 1 or with a reversal antigen sequence from Table 1. Such LEAPS™ heteroconjugates contemplated in certain embodiments include EVKEIREGNKLLDGGGEGKPGQEGKFGAI and EVKEIREGNKLLDGGGIAGFKGEQGPKGE, where the reversal sequence for Peptide J (SEQ ID No. 49) is conjugate with the reversal sequence of SEQ ID No. 1 or the non-reversal sequence of SEQ ID No. 1, respectively.

Methods of Treating a Subject with LEAPS™ Heteroconjugates

[0146] Any of the LEAPS™ heteroconjugates in accordance with Formulae (I)-(IV) described above can be combined with an appropriate pharmaceutically suitable carrier with one or more optional adjuvants for administration to a subject. Such combination of the LEAPS™ heteroconjugates and a pharmaceutically suitable carrier can function to modulate an immune response as outlined for any of the autoimmune related conditions on Table 1 or can function as a vaccine to confer immune resistance to a broad spectrum of cancers as outline in Table 2. For example, an immunomodulatory peptide constructs having any of SEQ ID No. 291, 293, 315, 317, 319, 325, 331, 339, 341, 347, 355, 782, 786, 804, 828, 856-866, 867-879, 881, 883-884, 886-895, 897, 899-904, 906-916 and 964-966 or a variant thereof or another LEAPS™ heterconjugate containing any of the described Peptides P₁ and an antigen sequence from Table 1, individually or as a mixture thereof, can be combined with a pharmaceutically suitable carrier to form a composition for modulating an immune response. Similarly, an immunomodulatory peptide constructs having any of SEQ ID No.'s 1045-1090 or a variant thereof or another LEAPS™ heteroconjugate containing any of the described Peptides P₁ and an antigen sequence from Table 2, individually, or as a mixture thereof, can be combined with a pharmaceutically suitable carrier to form a vaccine composition.

[0147] LEAPS™ technology directly mimics cell to cell interactions on the dendritic and T-cell surfaces using synthetic peptides. The LEAPS™ heteroconjugates containing the antigenic epitope linked to an ICBL can be manufactured by peptide synthesis or by covalently linking two peptides. Depending on the type of LEAPS™ heteroconjugates and ICBL used, the peptide construct is able to direct the outcome of the immune response towards the development of T-Cell function with primary effector T-cell functions: T Lymphocyte: helper/effector T Lymphocyte, type 1 or 2 (Th1 or Th2), cytotoxic (Tc) or suppressor (Ts) without excessive amounts of proinflammatory and inflammatory cytokines.

[0148] The type of the immune response elicited against an immunogen or a natural infection can be classified as Th1/Tc1, Th2/Tc2 or Th3 based on the predominant IgG subtype, the cytokines that are induced, or the presence or absence of delayed type hypersensitivity (DTH) response. A Th0 response is an earlier response that can mature into either a Th1 or a Th2 response and has features of both. The Th1 (CD4)/Tc1 (CD8) response is characterized by activation of CD4⁺ and CD8⁺ T cells to produce IL-2, TNF-β, and IFN-γ and to promote the production of IgM and specific IgG antibody subtypes and cell-mediated immune responses including delayed-type hypersensitivity (DTH). These response reinforce early, local and inflammatory responses. Th2 responses promote different IgG subclasses, IgE and IgA responses but not cell mediated responses to antigen (Ag). Th2 responses prevent the onset of protective Th1 cell mediated responses important for infection control, which may exacerbate disease. Initiation of Th1 and Th2 responses has important implications in terms of resistance and susceptibility to disease. Th1-dominated responses are potentially effective in eradicating infectious agents, especially viruses and intracellular infections, and are important for the induction of cytotoxic T lymphocytes (CTL). In contrast, a Th2 response is insufficient to protect against challenge with intracellular infections, but can provide protection against parasite and extracellular agents that can be neutralized by antibodies and against autoimmunity. Most importantly, for many vaccine it is thought that initiation of immunity with a Th1 response and then progression to a Th2 response promotes better immune memory.

[0149] Many suitable pharmaceutical carriers are known to persons, skilled in the art. The primary function of the pharmaceutical carrier is to assist in the delivery and/or administration the immunomodulatory peptide construct to a subject. The pharmaceutical carrier can be as simple as sterilized water. In certain embodiments, the pharmaceutical suitable carrier is a sterile pyrogen-free formulation containing from about 0.2 mg/mL to about 10 mg/mL of the immunomodulatory peptide construct in phosphate-buffered saline (PBS) and trehalose or other sugar that has been lyophilized to remove water and reconstituted prior to use with sterilized water for injection to a subject.

[0150] Optional adjuvants include products such as GMP products including Montanide ISA-51 (Seppic, Fairfield, N.J.), Depovax, a patented liposomal adjuvant currently in phase I trials by Immunovaccine Technologies, and MASI, a proprietary water-in-oil GMP adjuvant from MerciaPharma currently in phase II clinical studies. Alum is currently the only FDA licensed adjuvant of the group. In certain embodiments, the composition administered to a subject containing a LEAPS™ heteroconjugate, as described herein, has mixture of an aqueous phase and an adjuvant oil phase from about 1:4 to about 4:1.

[0151] A composition having the LEAPS™ heteroconjugate and a suitable pharmaceutical carrier with or without an optional adjuvant can be administered to a subject by subcutaneous or intramuscular injection in a therapeutically effective amount. The subject can be a mammal subject including a human subject.

[0152] Freund's Incomplete Adjuvant is also contemplated (Sigma Corp., St. Louis, Mo.). For Product Number F5506, the Storage Temperature is 2-8° C. where F5881 is a clear, amber liquid containing particulate matter (dried cells). F5506 is a clear amber liquid. Freund's incomplete Adjuvant is one of the most commonly used adjuvants in research. It is used as a water-in-oil emulsion. It is prepared from non-metabolizable oils (paraffin oil and mannide monooleate). First developed by Jules Freund in the 1940's, Freund's Adjuvant is designed to provide continuous release of antigens necessary for stimulating a strong, persistent immune response. The main disadvantage of Freund's Adjuvant is that it can cause granulomas, inflammation at the inoculation site and lesions. To minimize side-effects, Incomplete Freund's Adjuvant is used for the boosts. (Freund, J. and McDermott, K., Proc. Soc. Exp. Biol. Med., 1942: 49:548-553; Freund, J. Ann. Rev. Microbiol., 1947: 1:291; Freund, J., Adv. Tuberc. Res., 1956: 7:130; Bennett, B. et al., J. Immuno. Meth., 1992: 153:31-40; Deeb, B. J. et al., J. Immuno. Meth., 1992: 152:105-113; Harlow, E. and Lane, D., Antibodies: A Laboratory Manual, Cold Spring Harbor Laboratory, 1988).

Maturation of Dendritic Cells with LEAPS™ Heteroconjugates

[0153] In certain embodiments, a subject's immune response is modulated by being administered DCs matured and activated in the presence of a LEAPS™ heteroconjugate consistent with Formulae (I) or (II), or alternatively a LEAPS™ heteroconjugate consistent with Formulae (III) or (IV). Modulation of an immune response required mimicking nature's approach to recognition of antigens. DCs play a major role in initiating and directing the immune response to an antigen. The initial host response to an antigen requires internalization of the antigen into the DC followed by processing and presentation by the MHC I or II proteins for T cell recognition. DCs, macrophages and B cells are capable of presenting antigens to CD4⁺ helper T cells and CD8⁺ cytotoxic T cells as peptides held within grooves of the class II and I MHC proteins, respectively. These cells can be functionally divided into DC1 and DC2 cell types based on the means of their activation, their cytokine output and the nature of their influence on T cells. DC1 cells product IL12 and promote Th1-type responses whereas DC2 cells promote Th2-type responses.

[0154] As described above, the LEAPS™ heteroconjugates described herein can be administered to a subject to modulate an immune response in vivo. The immunomodulatory peptide constructs can also modulate the properties of immune cells, including DCs, ex vivo, in order to activate, mature, and direct the character and phenotype of immune cells, (e.g. DCs) contacted with the LEAPS™ heteroconjugate. Such treated immune cells, which can include DCs and/or monocytes, can then be introduced into a subject for the purpose of modulating an immune response in an autoimmune condition, DCs treated with a LEAPS™ heteroconjugate ex vivo and transferred to a subject can confer acquired immunity to the subject. As used herein, the term ex vivo means that the LEAPS™ heteroconjugate is contacted with living cells outside of the subject's body.

[0155] In certain embodiments, DCs and/or monocytes are extracted from a subject or donor away from other tissues of the body. The dendritic cells and/or monocytes are then contacted with one or more LEAPS™ heteroconjugates. DCs and/or monocytes isolated from a subject or donor can be in an immature state characteristic of immune cells prior to contact with an antigen. Such cells are herein referred to as immature DCs (iDCs). The DCs and/or monocytes can be isolated from blood derived monocytes and/or bone marrow taken from a subject or donor. DCs and/or monocytes expressly include monocyte cells capable of differentiating into macrophages and/or dendritic cells that can function to present antigens to T cells under appropriate conditions. Upon contact or treatment of the isolated dendritic cells and/or monocytes with the LEAPS™ heterconjugates, the dendritic cells and/or monocytes undergo a maturation to a state that directs and/or modulates an immune response.

[0156] As defined herein, the term “immature DCs” (iDCs) refers to cells derived from a donor or subject that are not competent to induce T cell activation upon interaction with T cells. Such iDCs are also known in the art as naive DCs. Such iDCs can have certain physical characteristics such as a reduced level of expression of CD80 and/or CD86, MHC molecules (class I and/or class II), other surface markers and a reduced appearance of dendrites. Immature DCs, as defined herein, expressly includes monocytes that can be stimulated to form dendritic cells. As defined herein, terms “matured DCs” and “more matured DCs” refer to DCs after contact with any of the LEAPS™ heteroconjugates described herein. Such matured DCs can have certain physical characteristics including upregulation of CD80 and/or CD86, MHC I or II molecules, an increased appearance of dendrites and secretion of IL-12p70.

[0157] In certain embodiments, contacting monocyte cells with one or more LEAPS™ heteroconjugates can induce the development of the monocyte cells or iDCs to DC1 (Th1-inducing dendritic cells) and/or DC2 cells (Th2-inducing dendritic cells) or other cell type allowing for acquired immunity when transferred to a subject. In certain other embodiments, iDCs and/or monocytes isolated from a subject or donor are contacted with a media containing granulocyte-macrophage colony stimulating factor (GM-CSF) to stimulate the expression of CD11c on the surface of the iDCs or monocytes. The iDCs and/or monocytes after exposure to GM-CSF are contacted with one or more LEAPS™ heteroconjugates to induce the maturation of the monocyte cells or iDCs to DC1 (Th1-inducing dendritic cells) and/or DC2 cells (Th2-inducing dendritic cells) or other cell type allowing for an immune response to be modulated when administered to a subject.

[0158] In certain embodiments, DCs and/or monocytes are extracted from a subject or donor away from other tissues of the body in a composition of isolated iDCs and/or monocytes. As described herein, a composition of isolated DCs and/or monocytes is composition in which the DCs and/or monocytes are present away from other body tissue including blood or bone marrow. In certain embodiments, a composition of isolated DCs and/or monocytes contains at least 50% of the viable cells present in the composition being DCs and/or monocytes. In certain embodiments, the composition of DCs and/or monocytes is substantially free from whole red blood cells.

[0159] In certain embodiments, the iDCs and/or monocytes are contacted or treated with one or more LEAPS™ heteroconjugates for about 6 hours to about 96 hours or from about 12 hours to about 72 hours. In certain other embodiments, the iDCs and/or monocytes are contacted or treated with one or more LEAPS™ heteroconjugates for a period of time longer than about 6 hours. In additional embodiments, the iDCs and/or monocytes are contacted or treated with one or more LEAPS™ heteroconjugates for a period of time longer than about 12 hours. In certain additional embodiments, the iDCs and/or monocytes are contacted or treated with one or more LEAPS™ heteroconjugates for a period of time longer than about 24 hours. In certain embodiments, the iDCs and/or monocytes are contacted or treated with one or more LEAPS™ heteroconjugates at a ratio from about 5 to about 50 micromoles of one or more LEAPS™ heteroconjugates per 10⁶ iDCs and/or monocytes. In certain other embodiments, the iDCs and/or monocytes are contacted or treated with one or more LEAPS™ heteroconjugates at a ratio greater than about 5 micromoles of one or more LEAPS™ heteroconjugates per 10⁶ iDCs and/or monocytes.

[0160] In certain embodiments, the iDCs and/or monocytes are contacted with GM-CSF for a period of about 1 day to about 10 days or from about 3 days to about 10 days. In certain additional embodiments, the iDCs and/or monocytes are contacted with GM-CSF for a period greater than about 5 days. In certain embodiments, the iDCs and/or monocytes are contacted with a media having a concentration of from about 5 to about 200 ng/mL of GM-CSF or from about 10 to about 150 ng/mL or GM-CSF. In other embodiments, the DCs and/or monocytes are contracted with a media having a concentration of GM-CSF greater than about 5 ng/mL. In certain embodiments, the DCs and/or monocytes are contacted with a media having a concentration of GM-CSF greater than about 15 ng/mL of GM-CSF.

[0161] Upon contact of iDCs and/or monocytes with the LEAPS™ heteroconjugate, an increased expression level of interleukin-12p70 (IL-12p70) can be observed relative to iDCs and/or monocytes not contacted with the LEAPS™ heteroconjugate. In certain embodiments, iDCs and/or monocytes contacted with the LEAPS™ heteroconjugate exhibit an up-regulation of at least one of the following: CD80, CD86, MHC class I, or MHC class II cell surface markers relative to iDCs and/or monocytes not contacted with the LEAPS™ heteroconjugate.

[0162] Immature dendritic cells and/or monocytes after contact with an immunomodulatory LEAPS™ heteroconjugate can be referred to as matured dendritic cells. The matured dendritic cells can modulate an immune response when administered or introduced into a subject. An immune response can be induced in a subject under situations where matured dendritic cells are washed free of LEAPS™ heteroconjugate that is unbound from the surface of a dendritic cell. As such, the amount of any antigen, including the antigen peptide P₂ forming part of the LEAPS™ heteroconjugate, introduced into a subject is limited.

[0163] Without wishing to be bound by any one particular theory, it is believed that the LEAPS™ heteroconjugate is retained on the surface of DCs in a manner allowing for the interaction of the LEAPS™ heteroconjugate with T cell receptor present on the surface of T cells. As such, DCs matured in the manner described above can be introduced or administered to a subject such that the LEAPS™ heteroconjugate present of the surface of the introduced or administered DCs can interact with the subject's in situ T cells to direct and/or modulate an antigen specific immune response. More specifically, activation of T cell-mediated immune response requires multiple stimulator interactions, including interaction with T cell receptor (TCR) present on the surface of T cells. It is believed that these more matured DCs having the LEAPS™ heterconjugate present of the surface can provide the necessary interaction to activate T cells and direct an immune response to the Peptide P₂ antigen of the LEAPS™ heteroconjugate. Further, it is believed that these more matured DCs formed using the methods described herein have an advantageous profile of secreted cytokines that do not stimulate a cytokine storm or other delirious inflammation response in a subject.

[0164] The more matured dendritic cells and/or T cells can be used in an autologous fashion. In certain embodiments, iDCs and/or monocytes are isolated from a subject to be treated, such isolated cells can be blood derived monocytes and/or bone marrow cells taken from the subject. The isolated iDCs and/or monocytes are contacted with one or more LEAPS™ heterconjugates having the structure P₁-x-P₂ or P₂-x-P₁ to induce maturation to more matured dendritic cells. An effective amount of the DCs are administered to the same subject from where the matured cells were originally isolated. The subject can be a mammal, including a human.

[0165] In certain other embodiments, iDCs and/or monocytes can be isolated from a compatible donor, treated with a heteroconjugate peptide having the structure P₁-x-P₂ or P₂-x-P₁ to induce maturation to form matured dendritic cells, and an effective amount of the matured dendritic cells and/or T cells administered to a subject having compatibility with the donor.

[0166] The matured DCs having been treated with the LEAPS™ heteroconjugate having the structure P₁-x-P₂ or P₂-x-P₁ can be administered to a subject either as a prophylactic or therapeutic treatment against the development of an autoimmune condition for an antigen contained in the LEAPS™ heteroconjugate, as a prophylactic or therapeutic treatment against the development of a cancer associated with an antigen contained in the LEAPS™ heteroconjugate or to modulate an existing immune response against such an autoimmune condition or cancer present in the subject.

Diagnostic Application of Dendritic Cells with LEAPS™ heteroconjugate

[0167] Further, it is believed that the modulation of an antigen specific immune response by maturation of DCs with the LEAPS™ heteroconjugate will sensitize the matured DCs to locate and/or to target the tissues, organ systems or other structures in the body where an autoimmune event is occurring. As such, the matured DCs can be used to detect, to diagnose and/or to locate an autoimmune related condition or cancer cells. Often, detection of autoimmune related conditions or cancer required the condition to reach a relatively advanced stage such that symptoms can be observed. Here, the matured DCs treated with a LEAPS™ heteroconjugate can be used to sensitively detect early stage conditions even before the appearance of symptoms.

[0168] Matured DCs treated with a LEAPS™ heteroconjugate have a property allowing for the location of such matured DCs to the site of an autoimmune condition or cancer cells in a subject. The LEAPS™ heteroconjugate has a P₂ peptide sequence originating or derived from an antigen associated with of an autoimmune condition or cancer, as described above. Maturation of DCs through treatment with a LEAPS™ heteroconjugate allows for the matured DCs to collect or locate in an area of a subject's body where autoimmune related conditions (e.g. arthritic joints) or cancer cells are present As such, an autoimmune related condition or cancer can be detected by observing matured dendritic cells administered to a subject collecting, locating or concentrating at a site within the subject's body where an undesirable immune response, such as an autoimmune response, is occurring or where cancer cells are present.

[0169] In certain embodiments, matured DCs can be labelled with a tracking marker to allow for their location within a subject's body to be tracked after administration to the subject. For example, matured DCs can be labelled with radionuclides (radioisotopes) to allow for the location of the labeled, matured DCs to be detected using appropriate equipment. Appropriate radionucleotides include radioactive isotopes of iodine such as ¹³¹I or ¹²⁸I as well as other radionuclides including ¹⁸F, ³²P, ⁶⁴Cu, ⁹⁰Y, ^{99m}Tc, ¹²⁴I, ⁸⁹Zr, ¹¹¹In, ¹⁸⁸Re, or ¹⁷⁷Lu. The location of radionucleotides can be determined using a radiation detector, single-photon tomography/computed tomography (SPECT/CT), scintillation camera, position emission tomography or photographic film sensitive to radiation. In certain further embodiments, matured DCs can be labeled with a dye, such as Cy5.5, Alexa Fluor®, carboxyfluorescein succinimidyl ester (CSFE), and other near-infrared (NIR) probes, where the presence of such dye-labelled DCs can be detected in tissues taken by biopsy from a patient administered the matured DCs. Additional NIR probes include Cy 5.5, CSFE, Alexa Fluor® dyes (Alexa), or other NIR dyes covalently linked to 4-N(S-glutathionylacetylaminophenyl)arsenoxide or 2,3-dicyanonaphthalene, such as 4-N(S-glutathionylacetylaminophenyl)aresenoxide-Cy5.5 4-N(S-glutathionylacetylaminophenyl)arsenoxide-CSFE, 4-N(S-glutathionylacetylaminophenyl)arsenoxide-Alexa, 2,3-dicyanonaphthalene-Cy5.5, and 2,3-dicyanonaphthalene-CSFE, and 2,3-dicyanonaphthalene-Alexa. In further embodiments, luminescence probes can also be conjugated to the LEAPS™ peptide construct or to LEAPS™-treated DCs. In certain embodiments, the presence of fluorescence in a tissue sample taken from a subject's body is determined by flow cytometry.

[0170] The immunomodulatory LEAPS™ heteroconjugates can be used to modulate a subject's immune system to detect the presence of an autoimmune condition at an early state. The LEAPS™ heteroconjugates can be used to mature immature DCs or monocytes isolated from the subject or a compatible donor to be sensitive to a desired antigen involved in an autoimmune related condition. Since the DCs can be manipulated outside of the body, the matured DCs can be labelled with a tracking marker in a manner allowing for sensitive detection. In particular, labelling with radionuclides can allow for detection down to very low levels.

[0171] In other embodiments, the immunomodulatory LEAPS™ heteroconjugates can be used to modulate a subject's immune system to detect the presence a cancer at an early stage. The LEAPS™ heteroconjugates can be used to mature immature DCs or monocytes isolated from the subject or a compatible donor to be sensitive to a desired antigen originating or derived from cancer cells where detection is desired. As described above, the DCs can be manipulated outside of the body and labelled with a tracking marker in a manner allowing for sensitive detection. In particular, labelling with radionuclides can allow for detection down to very low levels. Similarly, a concentrated location of a contrasting agent can be made readily apparent in an MRI image or the presence of a fluorescent or luminescent dye can be discerned at very low levels of such agents.

[0172] In certain embodiments, immature DCs and/or monocytes are collected from a subject or a compatible donor and matured by treatment or contact with a LEAPS™ heteroconjugates having a structure of Formulae (I) or (II) and incorporating an antigen peptide (P₂) sequence as described on Table 1. Alternatively, a LEAPS™ heteroconjugate having a structure of Formulae (III) or (IV) can also be used. The matured DCs are administered to the subject through an intravenous route or another appropriate route and a period of time is allowed to elapse. A diagnostic determination of the presence or location of an autoimmune condition can be made by observing the location of the administered matured dendritic cells and/or tracking marker. when the relevant condition is present in the body of the subject, the matured DCs and/or tracking marker will concentrate at the location, tissue type or organ structure where the autoimmune related condition is occurring or where cancer cells are present. When the targeted condition is not present, the matured DCs and/or tracking marker is expected to be diffused in different locations of the subject's body and not concentrated in any particular location, tissue type or organ structure.

[0173] The diagnostic determination can be made by only observing the location, tissue type or organ structure for which the autoimmune condition is expected to be found. For example, if matured DCs are made with a LEAPS™ heteroconjugates containing an antigen sequence derived from collagen, then only observation of presence of the matured DCs and/or tracking marker in specific joints of the body that may be affected by arthritis needs to be made. Since the amount of tracking marker administered to the subject is known, a determination of a concentration of the matured DCs and/or tracking marker in a specific location, tissue type or organ structure can be made without the need for a direct comparison with other body tissues.

[0174] In certain embodiments, a majority of the matured DCs and/or tracking marker is present in a specific location, tissue type or organ structure of the subject indicating the presence of the targeted autoimmune condition or cancer. In certain other embodiments, at least about 75% of the matured DCs and/or tracking marker are present in a specific location, tissue type or organ structure of the subject indicating the presence of the targeted autoimmune condition or cancer. In certain other embodiments, less than a majority of the matured DCs and/or tracking marker present in a specific location, tissue type or organ structure can indicate the presence of the targeted autoimmune condition or cancer when the matured DCs and/or tracking marker in the specific location, tissue type or organ structure is higher than in surrounding areas.

### Labeling of Dendritic Cells and Delivery of Therapeutic Compounds

[0175] The ability of LEAPS™ heteroconjugates treated DCs to locate to the site of an autoimmune event or cancer can be utilized to deliver therapeutic agents directly to the site of the autoimmune related condition or cancer in addition to the diagnostic applications discussed above. At least a portion of the LEAPS™ heteroconjugates used to treat the DCs is expected to remain associated with the DCs. As such, the LEAPS™ heteroconjugate can be associated or conjugated to a tracking marker, such as a radioisotype, or to a therapeutic agent. For example, the LEAPS™ heteroconjugates peptide can be conjugated to monomethyl auristatin (a microtubule inhibitor), saporin, or maytansinoid 1 molecule using a cathespsin cleavable valine-citrulline (vc) dipeptide linker to a cysteine or lysine residue on the LEAPS™ heteroconjugates. The therapeutic agent or radioisotope conjugated to a LEAPS™ heteroconjugate or to an mAb can be conjugated or linked to a lysosomatropic agent. A lysosomatropic agent is a weak organic base that can diffuse through membranes but will become protonated in the lysosome of a cell, where the protonated lysomatropic agent is unable to diffuse through membranes and will, therefore, be trapped within the cell. Hydrophobic amines, including butylamine, spermidine, spermine, methylamine, and cyanine dyes (including those used for studying membrane potential or that are used as tracers in neurobiology) are examples of lysosomatropic agents. These lysosomatropic agents can be modified to be conjugated to a radioisotope or to a therapeutic compound (e.g. cytokines, SEB, SEA or other molecules) by a cleavable linkage to the radioisotope or compound. Other active sites on select amino acids can also serve as sites of attachment of drugs, dyes toxins or cytokines, such as OH groups on serine or threonine residues, the CH₃S group on methonine residues, carboxyl groups (COOH) on aspartic or glutamic acid residues, amine groups on lysine residues or the N-terminus of the peptide construct or amide groups on asparagine. Such groups (e.g. OH, COOH, CH₃S amine, amide, etc) can be engineered into the LEAPS™ heteroconjugates to serve as a conjugation site for the therapeutic compound or dye. Ina similar manner, a radioisotope chelated by a chelation compound can be conjugated to the LEAPS™ heteroconjugates.

[0176] For the targeting of cancer, the ability of LEAPS™ heteroconjugate treated DCs to locate to the site of cancer cells can be utilized to deliver therapeutic agents directly to the site of the cancer cells. At lest a portion of the LEAPS™ heteroconjugates used to treat the DCs is expected to remain associated with the DCs. As such, the LEAPS™ heteroconjugate can be associated or conjugated to a tracking marker, such as a radioisotope, or to a therapeutic or anti-cancer agent. For example, the LEAPS™ heteroconjugates peptide can be conjugated to a radioisotope chelated by a chelation compound can be conjugated to the LEAPS™ heteroconjugates.

[0177] An alternate approach for the association of a tracking marker or a therapeutic compound with the of LEAPS™ heteroconjugate treated DCs is conjugation of such species to the cell surface of the DCs. A tracking marker or therapeutic agent can be conjugated with a monoclonal antibody (mAb), a therapeutic agent or an anticancer agent. An organic molecule having the property of a therapeutic agent, an anticancer agent or a dye can be linked to a monoclonal antibody through a cysteine, lysine or other amino acid residue present on the mAb. A cleavable linker such as a valine-citrulline dipeptide linker can also be used. The mAb can have affinity for MHC II (anti-MHC II) or CD11c (anti-CD11c) or another cell surface marker present on DCs. Examples of cell surface markers for which the antibody can have affinity to include DEC-205. Dectin-1, DC-SIGN, and DC-LAMP. In this manner, the mAb servers to associate the therapeutic agent with the DCs with high affinity. Radioisotopes can be associated with DCs in a similar manner, where a radioisotope is either chelated by an organic chelation molecule or covalently bonded to an organic molecule conjugated with a mAb.

[0178] Examples of therapeutic compounds or anticancer agents include immune system suppressors or even cytotoxic drugs such as monomethyl auristatin E (MMAE), saporin, maytansinoid 1, ozogamicin, doxorubicin, emtansine, carboplatin, 5-fluorouracil, docetaxel, gelonin, receptor tyrosine kinase inhibitors, phosphatidylinositol 3-kinase inhibitors, norifensine, and irinotecan (CPT-11) as well as larger molecules such as interferon-alpha, staphylococcal enterotoxin A superantigen (SEA) or staphylococcal enterotoxin B (SEB) (using the chemical conjugating reagent N-succinimidyl 3-(2-pyridyldithio)propionate) or other agents such as 1-Ethyl-3(3-dimethylaminopropyl)carbodiimide (EDC) or 3-maleimidobenzoyl-N-hydroxysuccinimide ester (MBS) for some dyes or therapeutic agents) or other materials. Cytokines such as interferon-α can also be used as therapeutic agents. Additional therapeutic agents include methotrexate, 5-fluorouracil, azathioprine, mecaptopurine, cyclophosphamide, cyclosporine A and prednisone. The use of LEAPS™ heteroconjugate-treated DCs to deliver therapeutic agents can be particularly effective for addressing toxicity. For example, the antimitrotic agent auristatin is 1001000 more potent than doxorubicin making auristatin highly toxic and not well-tolerated at therapeutic doses. By targeting such cytotoxic agents by conjugation with LEAPS™ heteroconjugate-treated DCs, the delivery of the cytotoxic agents to target cells is more specific and reduces safety concerns.

[0179] further, radioisotopes can serve as therapeutic agents as well as tracking markers. Radioisotopes such as ⁹⁰Y and ¹⁸⁸Rc are high-energy beta-emitters that can deliver ionizing radiation to the site of autoimmune related condition. Similarly, radioisotopes such as ⁶⁴cu and ¹²⁴I are alpha-emitters that can be used to deliver ionizing radiation to the site.

[0180] In a further embodiment, the LEAPS™ heteroconjugate or a mAb can be conjugated to a fluorescent dye. Suitable dyes include N,N′-di-carboxypentyl-indodicarbocyamine-5,5′-disulfonic acid (Cy 5.5) and other near-infrared (NIR) dyes such as those made by Alex fluor. Additional NIR probes include Cy 5.5 covalently linked to 4-N(S-glutathionylacetylaminophenyl)-arsenoxide-Cy5.5 and 2,3-dicyanonaphthalene-Cy5.5. Additionally, DCs can be directly stained by carboxyfluorescein succinimidyl ester (CFSE). Additional NIR probes include CSFE, Alexa Fluor® dyes (Alexa), or other NIR dyes covalently linked to 4-N(S-glutathionylacetylaminophenyl)arsenoxide or 2,3-dicyanonaphthalene, 4-N(S-glutathionylacetylaminophenyl)arsenoxide-CSFE, 4-N(S-glutathionylacetylaminophenyl)arsenoxide-Alexa, and 2,3-dicyanonaphthalene-CSFE, and 2,3-dicyanonaphthalene-Alexa. In particular, CY 5.5 Alexa Fluor® and other NIR dyes exhibit low absorption of the NIR signal in tissue at operating wavelengths and may be quenched by conjugation of two or more NIR probe molecules together. Cleavage of the conjugation bonds results in fluorescence dequenching and generation of a signal that is suitable for imaging. A fluorescent image can be made by endoscopy or by taking a tissue biopsy. A tissue biopsy can be examined by flow cytometry to identify the presence of fluorescent cells.

### EXAMPLES

[0181] The ability of a LEAPS™ heteroconjugate containing an antigen originating from herpes simplex I virus (HSV-I) was investigated to demonstrate the ability of LEAPS™ heteroconjugate to cause the maturation of treated DCs. The JgD LEAPS™ heteroconjugate peptide contained peptide J (DLLKNGERIEKVE, SEQ ID No. 49) conjugated to a peptide from the N-terminus of HSV-I glycoprotein D (gD) (SLKMADPNRFRGKDLP, SEQ ID No. 952), amino acid 8-23, through a triglycine linker. As such, the JgD LEAPS™ heteroconjugate peptide has the sequence DLLKNGERIEKVEGGGSLKMADPNRFRGKDLP (SEQ ID No. 953).

[0182] An additional LEAPS™ heteroconjugate containing an antigen derived from HIV virus was also used to demonstrate the ability of LEAPS™ heteroconjugate to cause a maturation of DCs. The JH LEAPS™ heteroconjugate peptide vaccine contained the peptide J (SEQ ID No. 49) ICBL conjugated to a peptide “HGP-30 (H) peptide from the p17 HIV gag protein YSVHQRIDVKDTKEALEKIEEEQNKSKKKA (aa 85-115) (SEQ ID No. 954) through a triglycine linker. As such, the JgH LEAPS™ heteroconjugate peptide has the sequence DLLKNGERIEKVEGGGYSVHQRIDVKDTKEALEKIEEEQNKSKKKA (SEQ ID No. 955).

### Preparation of Bone Marrow Cells

[0183] Bone marrow (BM) cells were prepared. Briefly, the femurs and tibias were obtained from five C57BL/6 female mice, and the ends were removed to expose the hollow bone packed with marrow. BM cells were flushed from the bones with cold Hanks Balanced Salt Solution (HBSS) using a sterile disposable 22 g needle and pooled. Red blood cells (RBCs) were lysed using Tris-buffered ammonium chloride and resultant cells were washed 3 times in HBSS, BM cells were suspended in tissue culture medium (TCM) (RPMI 1640 with glutaminic plus 100 mg/nl. PenStrep, 50 μM 2-mercaptoethanol, and 5% fetal calf serum) at approximately 5×10⁶ cells/ml and incubated for 1 hour at 37° C. in a 5% CO2 atmosphere in plastic tissue culture flasks to remove adherent, mature macrophages. Decanted non-adherent cells were resuspended in TCM and 1.5×10⁶ BM cells in 1 ml were placed into each well of a 24 well tissue culture plate (Falcon) and either left untreated or treated with 14.5 micromoles of peptide J or JgD LEAPS™ heteroconjugate. After incubation for 48 hrs at 37° C., cells were viewed and photographed for changes in morphology, tissue culture supernatants were removed and the cells were prepared for flow cytometric analysis.

[0184] Immature DCs were generated from the bone marrow of five normal C57BL/6 female mice. Briefly, BM cells were harvested as before and cultured at 5×10⁵/ml in 75 cm2 flasks at 37° C., 10% CO2 for 6 days in a complete media (CM) containing RPMI 1640, 10% fetal bovine serum, 2 mM glutamine, 0.1 mM nonessential amino acids, 100 units/ml sodium pyruvate, 100 mg/ml PenStrep. 0.5 mg/ml fungizone. 50 ug/ml gentamicin, 50 um 2-mercaptoethanol, supplemented with 10 ng/ml of human IL-6 (Peptrotech, Rocky Hill, N.J.) and 10 ng/ml human Flt-3 (gift of Amgen, Thousand Oaks, Calif.). On day 6, the cells were washed twice in Dulbecco's PBS. 4×10⁶ cells/well were transferred to a 24-well cluster plate and cultured in CM supplemented with 10 ng/ml of human GM-CSF (gift of Immunex, Seattle, Wash.), and incubated for 24 hrs. Cells were then analyzed by flow cytometry for expression of CD11c, CD80, CD86, MHC II, CD34, and OX40L, confirming the purity or the iDC population.

[0185] Immature DCs were either untreated or treated with 3.625, 7.25, or 14.5 micromoles of JgD peptide and maintained in CM without GM-CSF. After 48 h incubation, spent medium was removed and immediately tested for the presence of IL-12p70 by direct ELISA.

Flow cytometry Analysis

[0186] For analysis of CD11c and CD86 expression, untreated and peptide treated BM cells, prepared and treated as described above, were labeled with PE-anti-Cd11c or PE-anti CD86 (Beckman Coulter Fullerton, Calif.) At least 106 cells were analyzed (Altra FACS, Beckman Coulter) using forward and side scatter parameters to limit (gating) the immunofluorescence analysis to cells of the size and granularity of monocytes and dendritic cells.

[0187] CD3+ cells were removed from BM cells using the fluorescence activated cell sorter and then untreated or treated with JgD, gD or JH. Flow cytometric analysis of the sorted population confirmed the removal of CD3 positive cells. The CD3− BM cells were labeled with FIT C-anti-CD8 (Beckman Coulter (clone 53-6.7)), fixed with paraformaldehyde, permeabilized with saponin (Intraprep, Immunotech), labeled with PE-anti-IL-12p70 (Beckman Coulter) and then post fixed with paraformaldehyde prior to immunofluorescence analysis.

[0188] The monocyte population of BM cells, as defined by light scatter parameters, was analyzed on the second day after treatment with J, gD, JgD or JH. Representative flow cytometric results are presented in FIGS. 1A-1B.

[0189] The untreated monocyte population contained very few CD11c or CD86 positive cells whereas the JgD LEAPS™ heteroconjugate-treated cells expressed CD11c (FIG. 1A) and CD86 (FIG. 1B). CD11c is a type I transmembrane protein found on most human and mouse dendritic cells and CD86 is a cell marker for mature DCs capable of signaling and activating T cells.

[0190] Treatment with gD or the J-ICBL alone caused no discernible change in CD111c or CD86 expression. Similarly, there was no significant increase in IL-12p70 expressing cells following J-ICBL treatment.

### Herpes Simplex Virus Challenge in the Zosteriform Spread Mouse Model

[0191] Mouse bone marrow cells were treated with JgD LEAPS™ heteroconjugate and incubated for 24 h, washed free of unbound vaccine or media components, and then injected subcutaneously or intraperitoneally. The subcutaneously or intraperitoneally injected cells conferred protection from disease and death from lethal herpes simplex virus challenge in the zosteriform spread mouse model. Mice (C57BL/6) received two injections of either JgD LEAPS™ heteroconjugate-treated DCs or untreated bone marrow cells. JgD LEAPS™ heteroconjugate-treated DCs were prepared by treating bone marrow cells with JgD for 24 h and the cells were washed free of peptide and media components. JgD LEAPS™ heteroconjugate-treated DCs or bone marrow cells were injected intradermally and intraperitoneally with a two week window and then the mice received a lethal challenge with HSV-1 H129 in the zosteriform-challenge model. Mice were either untreated, treated with 24 h cell cultured bone marrow cells (BM). J Peptide ICBL treated bone marrow cells (J-BM), JH LEAPS™ heteroconjugate-treated dendritic cells (JH-DC) or JgD LEAPS™ heteroconjugate-treated bone marrow cells (JgD-DC). Symptoms were scored on the following scale: 0: no disease; 1: non-specific changes: 2: local disease; 3: early zosteriform spread; 4: later zosteriform spread with scores; 5: moribund disease; 6: death. Mice were scored daily for symptoms and the average for the group is presented in FIG. 3.

[0192] Mice receiving no treatment, untreated mouse bone marrow cells (BM), mouse bone marrow cells treated with the J peptide immune cell binding ligand only (J-BM) and/or JH LEAPS™ heteroconjugate-treated dendritic cells (JH-DC) incurred significant disease with zosteriform spread and death of a majority of the group within 2 weeks. Whereas, all of the mice receiving bone marrow cells treated with JgD LEAPS™ heteroconjugate-treated dendritic cells (JgD-DC) and challenged with HSV-survived and most showed signs of disease (6 of 7).

[0193] FIG. 2 shows a Kaplan Meier survival curve for the JgD-DC and untreated BM vaccinated mice. FIG. 3 is a disease score plot showing a reduction or prevention of symptoms of disease signs for mice treated with JgD-DC as compared with: No treatment; Untreated BM: j BM; and JH DC.

[0194] These results prove that the DCs generated by JgD treatment of bone marrow cells are sufficient to initiate and develop an immune response sufficient to provide protection from a large lethal HSV infection. These results further prove that the LEAPS peptide stays on the surface of the DC for long periods and can interact with T cells to elicit the response.

### Immune Modulation in an Arthritis Model

[0195] The ability of LEAPS™ heteroconjugates to modulate an immune response in an autoimmune condition was investigated for heteroconjugates labeled CEL-2000 (DLLKNGERIEKVEGGGTGGKPGIAGFKGEQGPKGEP, SEQ ID No. 912) and CEL-2003 (DLLKNGERIEKVEGGGDAGEPGIAGFKGDQGPKGET, SEQ ID No. 956). CEL-2000 is formed by linking Peptide J (SEQ ID No. 49) to the human type II collagen peptide 254-273 (TGGKPGIAGFKGEQGPKGEP, SEQ ID No. 812) through a triglycine linker. CEL-2003 is formed by linking Peptide J (SEQ ID No. 49) to the corresponding murine type II collagen peptide 254-273. DAGEPGIAGFKGDQGPKGET (SEQ ID No. 855), through a triglycine linker.

[0196] The following study is of CEL-2000 therapeutic vaccine for collagen induced arthritis (CIA) where the first step was to identify a good animal model for testing the vaccine, which is the collagen induced arthritis (CIA) model in young (6-7) week old male DBA/IJ mice. These mice received 2 injections of bovine collagen the first in complete Freund's adjuvant (CFA) on day 0 and then 3 weeks later on day 21, in Incomplete CFA. After the second collagen injection, the mice were evaluated daily for any joint swelling or redness. Each of the paws was scored on a 4 point scale (Arthritis Index (AI) with respect to the number of digits with symptoms and the thickness of the paw measured, at least 3-4 times a week. Each mouse was weighed weekly.

[0197] When significant disease is noted, usually about day 28, the mice are grouped (n=8) with a range of scores between 1 and 6 and group mean of 2.5 to 3. At this point the therapy begins according to protocol. Controls include groups with induced disease but no therapy and groups of healthy mice without induced disease. A therapy control of Enbrel® (3 mg/kg, every other day) was included. Over the 28-day course of study, the outcomes of different CEL-2000 and CEL-2003 treatment schedules were compared with Enbrel. In this study, CEL-200 treatment with 2 doses of 33 or 100 nmol were given subcutaneously on days 0 and 7 or on days 0 and 14. CEL-2003 was used at one dose of 33 mmol on days 0 and 14. Most regimes reduced the progression of arthritis disease to levels that were at least as good as those of mice treated with Enbrel® (every other day for the 28 days of the study). Immunization of mice with the 100 nmol dose (3× treatment) on days 0 and 7 appeared to limit the progression of disease throughout the experimental period as shown in FIG. 4. The AI score for each paw (4 paws total) were added for each group and reported on FIG. 4.

[0198] The CEL-2003 links the corresponding murine (CII254-273 sequence DAGEPGIAGFKGDQGPKGET (SEQ ID No. 855) to the J ICBL. This trial suggests that the dosage and schedule of administration (time between initial and second immunization) are important parameters for CEL-2000 treatment. use of a student “t” Test analysis of Treatment groups at day 7 days 14 and 21 to calculate the p value showed the 3× dose of CEL-2000 on day 0 and 14 followed by 3× on day 0 and 7 or 1× on day 0 and 7 is equivalent to days 0 and 14 and slightly better than Embrel every other day for all 28 days.

[0199] As such LEAPS™ heteroconjugates are demonstrated to be at least as affective as Enbrel® in addressing the autoimmune response in the CIA model. As such, LEAPS™ heteroconjugates are demonstrated immunomodulators.

### REFERENCES

[0200] 1 Hammer et al., HLA class I peptide binding specificity and autoimmunity, 1997, Adv. Immunol, 66:67 Tisch et al., Induction of Glutamic Acid Decarboxylase 65-Specific Th2 Cells and Suppression of Autoimmune Diabetes at Late Stages of Disease Is Epitope Dependent 1999. J. Immunol. 163:1178; Yoon et al., Control of Autoimmune Diabetes in NOD Mice by GAD Expression or Suppression in β Cells 1999, Science 284:1183; Ruiz et al., Suppressive Immunization with DNA Encoding a Self-Peptide Prevents Autoimmune Disease: Modulation of T Cell Costimulation 1999, J. Immunol., 162:3336: Kreo et al., Identification of T Cell Determinants on Human Type II Collagen Recognized by HLA-DQ8 and HLA-DQ6T Transgenic Mice 1999, J. Immunol., 163-1661.
[0201] 2 Gharavi et al., GDKV-Induced Antiphospholipid Antibodies Enhance Thrombosis and Activate Endothelial Cells In Vivo and In Vitro 1999, J. Immunol., 163:2922
[0202] 3 U.S. Pat. No. 4,666,829.
[0203] 4 WO9748792A1, WO 98/03644A1 and U.S. Pat. No. 5,811,633 (Frenkel et al., 2001 Generation of auto-antibodies towards Alzheimer's disease vaccination. Vaccine 19:2615.
[0204] 5 Li et al., Cryptic Epitope Identified in Rat and Human Cardiac Myosin S2 R Induces Myocarditis in the Lewis Rat. J Immunol, 2004, 172:3225-3234), and include S2-16
[0205] 6 Autoantibodies against cardiac troponin 1 are responsible for dilated cardiomyopathy in PD-1-deficient mice, Nat Med. 2003 December: 9(12):1477-83.
[0206] 7 Ansari et al (1994 “Epitope mapping of the branched chain alpha-ketoacid dehydrogenase dihydrolipoyl transacylase (BCKD-E2) protein that reacts with sera from patients with idiopathic dilated cardiomyopathy”. J Immunol 153(10):4754-65) identified the peptide BCKD-E2₁₁₆₋₁₃₄.
[0207] 8 Adderson E et al (1998, Molecular analysis of polyreactive monoclonal antibodies from rheumatic carditis: human anti-N-acetylglucosamine/anti-myosin antibody V. region genes, J. Immunol. 161:2020-31) identified two peptides as follows LMM 1
[0208] 9 Wilson et al., Therapeutic alteration of Insulin-Dependent Diabetes Mellitus. Progression by T Cell Tolerance to Glutamic Acid Decarboxylase 65 Peptides In Vitro and In Vivo, 2001, J Immunol., 167:569, Tisch et al., SUPRA 1999 J I 163:1178; Karlsson et al., Th1-like dominance in high-risk first-degree relatives of type I diabetic patients 2000. Diabetologia 43:742.
[0209] 10 (Quinn et al., MHC Class I-Restricted Determinants on the Glutamic Acid Decarboxylase 65 Molecule Induce Spontaneous CTL Activity, 2001, J. Immunol., 167:1748, Herman A et al., Determination of Glutamic Acid Decarboxylase 65 Peptides Presented by the Type 1 Diabetes-Associated HLA-DQ8 Class II Molecule Identifies an Immunogenic Peptide Motif 1999 JI 163:6275; Winer at al., Peptide Dose, MHC affinity, and Target Self-Antigen Expression Are Critical for Effective Immunotherapy of Nonobese Diabetic Mouse Prediabetes 2000 JI 165:4086.
[0210] 11 Wilson et al., SUPRA Karlsson et al., SUPRA.
[0211] 12 Quinn et al., SUPRA JI 167:1748 2001, Herman A et al., SUPRA 1999 JI 163:6275, Liu J, et al., Major DQ8-restricted T-cell epitopes for human GAD65 mapped using human CD4, DQA1*0301, DQB1*0302 transgenic IA (null) NOD mice Diabetes, 1999 March; 48(3):469-77.
[0212] 13 Winer et al., SUPRA 2000 JI 165:4086, Karlsson et al., SUPRA Diabetologia 43:742.
[0213] 14 Urbank-Ruiz et al., Immunization with DNA encoding an immunodominant peptide of insulin prevents diabetes in NOD mice, 2001, Clin Immunol 100(2): 164-171, Abiru et al., Peptide and Major Histocompatibility Complex-Specific Breaking of Humoral Tolerance to Native Insulin With the B9-23 Peptide in Diabetes-Prone and Normal Mice Diabetes 50:1274 2001.
[0214] 15 Elias et al., Induction of diabetes in standard mice by immunization with the p277 peptide of a 60-kDa heat shock protein, 1995, Eur J Immunol 25:2815.
[0215] 16 Ou et al., Cross-reactive rubella virus and glutamic acid-decarboxylase (65 and 67) protein determinants recognized by T cells of patients with type 1 diabetes mellitus, 2000, Diabetologia 43:750.
[0216] 17 Peakman M 1999: (Naturally processed and presented epitopes of the islet cell autoantigen IA-2 eluted from HLA-DR4, J. Clin Invest 104:1449-1457).
[0217] 18 Krco C et al (1999 Identification of T cell determinants on human type II collagen recognized by HLA-DQ8 and HLA-DQ6 transgenic mice. J Immunol. 163(3):1661-5
[0218] 19 Yamamoto N et al (2003 Essential role of the cryptic epitope SLAYGLR within osteopontin in a murine model of rheumatoid arthritis. J. Clin. Invest. 112:181-188.
[0219] 20 Prakken B et al 2004 Epitope-specific immunotherapy induces immune deviation of proinflammatory T cells in rheumatoid arthritis, Proc Nat Acad Sci USA 101:4228-4233.
[0220] 21 Veldman C et al (2004 T cell recognition of desmoglein 3 peptides in patients with pemphigus vulgaris and healthy individuals. J Immunol. 172:3883-92).
[0221] 22 Abreu-Velez A et al (2003 The tryptic cleavage product of the mature form of the bovine desmoglein 1 ectodomain is one of the antigen moieties immunoprecipitated by all sera from symptomatic patients affected by a new variant of endemic pemphigus. Eur J Dermatol. 13:359-66.
[0222] 23 Hammer J, et al (1997 HLA class II peptide binding specificity and autoimmunity. Adv. Immunol. 66:67-100).
[0223] 24 Ruiz P, et al. (1999 Suppressive immunization with DNA encoding a self-peptide prevents autoimmune disease: modulation of T cell costimulation. J Immunol. 162:3336-41).
[0224] 25 Araga S et al (1999) A complementary peptide vaccine that induces T cell anergy and prevents experimental allergic neuritis in Lewis rats. J. Immunol. 163(1):476-82.). In a related mocel Experimental Allergic neuritis a peptide from peripheral nerve P2 60-70 or EAN 60-70.
[0225] 26 de Rosbo N et al (2004). The myelin-associated oligodendrocytic basic protein region MOBP15-36 encompasses the immunodominant major encephalitogenic epitope(s) for SJL/J mice and predicted epitope(s) for multiple sclerosis-associated HLA-DRB1*1501. J Immunol. 173:1426-35; Khare M et al (2003). HLA class II transgenic mice authenticate restriction of myelin oligodendrocyte glycoprotein-specific immune response implicated in multiple sclerosis pathogenesis. Int Immunol. 15:535-46.
[0226] 27 Krogsgaard M et al (2000: visualization of Myelin Basic Protein (MBP) T Cell Epitopes in Multiple Sclerosis Lesions using a Monoclonal Antibody Specific for the Human Histocomatibility Leukocyte Antigen (HLA)-DR2-MBP 85-99 Complex, J. Exp Med. 191:1395-1412.
[0227] 28 Pender M et al (2000 Surges of Increased T Cell Reactivity to an Encephalitogenic Region of Myelin Proteolipid Protein Occur More Often in Patients with Multiple Sclerosis Than in Healthy Subjects, J. Immunol. 165:5322-5331.
[0228] 29 Forsthuber T. et al (2001 T Cell Epitopes of Human Myelin Oligodendrocyte Glycoprotein Identified in HLA-DR4 (DRB1*0401) Transgenic Mice Are Encephalitogenic and Are Presented by Human B Cells, J Immunol 167:7119-7125.
[0229] 30 Fridkis-Hareli M, et al (2002: Novel synthetic amino acid copolymers that inhibit autoantigen-specific T cell responses and suppress experimental autoimmune encephalomyelitis, J Clin Invest 109:1635-1643.
[0230] 31 Weissert R, et al (2002: High Immunogenicity of Intracellular Myelin Oligodendrocyte Glycoprotein Epitopes, J Immunol, 169:548-556.
[0231] 32 Bora N et al 1997 Induction of experimental autoimmune anterior uveitis by a self-antigen: melanin complex without adjuvant. Invest Ophthalmol vis Sci. 1997 September: 38(10):2171-5; bora N et al 1995 Experimental autoimmune anterior uveitis. Induction with melanin-associated antigen from the iris and ciliary body. Invest Ophthalmol Vis Sci. May: 36(6):1056-66); Mirahi T et al (2002 The Tissue-Specific Self-Pathogen Is the Protective Self-Antigen: The Case of Uveitis; J Immunol: 169:5971-5977) 1177-1191.
[0232] 33 Avichezer D et al (2000 Identification of a New Epitope of Human IRBP that Induces Autoimmune Uveoretinitis in Mice of the H-2b Haplotype; Invest Ophthalmol Vis Sci., 2000, 41:127-131.
[0233] 34 Yoshikawa H et al 1997 A 17-Mer self-peptide of acetycholine receptor binds to B cell MHC class II, activates helper T cells, and stimulates autoantibody production and electrophysiologic signs of myasthenia gravis. J Immunol. 159:1570-7).
[0234] 35 Ben-Davis H et al 2005 Down-regulation of myasthenogenic T cell responses by a dual altered peptide ligand via CD4+CD25+-regulated events leading to apoptosis, PNAS; 2028-2033).
[0235] 36 Iversen et al arch Dermatol Res 287:761 1995.
[0236] 37 Autoimmune Diseases and peptide Variations. Wataru Honda, et al. Genome Informatics 2005, 16(1): 272-280.
   [0237] 37.17 hsa23439
   [0238] 37.33 hsa1579
   [0239] 37.10 has1059
   [0240] 37.7 hsa55703
   [0241] 37.7.1 hsa 3008
   [0242] 37.7.2 hsa54433
   [0243] 37.20 hsa4650
   [0244] 37.13 has9967
   [0245] 37.15 has7155
   [0246] 37.18 has1288
   [0247] 37.12 has27253

[0248] Items 38-74 shown by the following accession numbers are available from “The NCBI handbook [Internet]. Bethesda (Md.): National Library of Medicine (US), National Center for Biotechnology Information; 2002 October Chapter 18. The Reference Sequence (RefSeq) Project. Available from

http://www.ncbi.nIm.nih.gov/protein/
[0249] 38 Protein Sequence Identification Number GI: 324021738
[0250] 39 Protein Sequence Identification Number GI: 324021740
[0251] 40 Protein Sequence Identification Number GI: 119586557
[0252] 41 Protein Sequence Identification Number GI: 151101270
[0253] 42 Protein Sequence Identification Number GI: 219517967
[0254] 43 Protein Sequence Identification Number GI: 55662652
[0255] 44 Protein Sequence Identification Number GI: 189405
[0256] 45 Protein Sequence Identification Number GI: 331640463
[0257] 46 Protein Sequence Identification Number GI: 94538350
[0258] 47 Protein Sequence Identification Number GI: 109730054
[0259] 48 Protein Sequence Identification Number GI: 119964718
[0260] 49 Protein Sequence Identification Number GI: 1162922
[0261] 50 Protein Sequence Identification Number GI: 187417
[0262] 51 Protein Sequence Identification Number GI: 4505909
[0263] 52 Protein Sequence Identification Number GI: 168985765
[0264] 53 Protein Sequence Identification Number GI: 4506453
[0265] 54 Protein Sequence Identification Number GI: 300253216
[0266] 55 Protein Sequence Identification Number GI: 4261947
[0267] 56 Protein Sequence Identification Number GI: 219519980
[0268] 57 Protein Sequence Identification Number GI: 62952506
[0269] 58 Protein Sequence Identification Number GI: 238908505
[0270] 59 Protein Sequence Identification Number GI: 4885379
[0271] 60 Protein Sequence Identification Number GI: 9506713
[0272] 61 Protein Sequence Identification Number GI: 194272142
[0273] 62 Protein Sequence Identification Number GI: 284172514
[0274] 63 Protein Sequence Identification Number GI: 116283446
[0275] 64 Protein Sequence Identification Number GI: 19913408
[0276] 65 Protein Sequence Identification Number GI: 219521281
[0277] 66 Protein Sequence Identification Number GI: 324021738
[0278] 67 Protein Sequence Identification Number GI: 110671329
[0279] 68 Protein Sequence Identification Number GI: 154425704
[0280] 69 Protein Sequence Identification Number GI: 4557671
[0281] 70 Protein Sequence Identification Number GI: 119590557
[0282] 71 Protein Sequence Identification Number GI: 62094
[0283] 72 Protein Sequence Identification Number GI: 119578370
[0284] 73 Protein Sequence Identification Number GI: 331640463
[0285] 74 Protein Sequence Identification Number GI: 1246092
[0286] 75 Lemere C A, Maron R, Spooner E T, Grenfell T J, Mori C, Desai R, Hancock W W, Weiner H L, Selkoe D J. Nasal A beta treatment induces anti-A beta antibody production and decreases cerebral amyloid burden in PD-APP mice. Annals of the New York Academy of Sciences 2000 January; 920:328-31.
[0287] 76 Lee M. Bard F, Johnson-Wood K, Lee C, Hu K, Griffith S G. Black R S, Schenk D, Seubert P. Abeta42 immunization in Alzheimer's disease generates Abeta N-terminal antibodies. Annals of neurology 2005 September: 58(3):430-5.
[0288] 77 Fu H J, Liu B, Frost J L, Lemere C A. Amyloid-beta immunotherapy for Alzheimer's disease. CNS & neurological disorders drug targets 2010 April: 9(2):197-206.
[0289] 78 Monsonego A. Maron R, Zota V, Selkoe D J. Weiner H L. Immune hyporesponsiveness to amyloid beta-peptide in amyloid precursor protein transgenic mice: implications for the pathogenesis and treatment of Alzheimer's disease. Proceedings of the National Academy of Sciences of the United States of America 2001 August: 98(18):10273-8.
[0290] 79 Monsonego A, Zota V, Karni A, Krieger J I, Bar-Or A, Bitan G, Budson A E, Sperling R, Selkoe D J, Weiner H L. Increased T cell reactivity to amyloid beta protein in older humans and patients with Alzheimer disease. The Journal of clinical investigation 2003 August: 112(3):415-22.
[0291] 80 Dobritzsch D et al 2011 Crystal structure of an arthritogenic anticollagen immune complex. Art & Rheum: 63:3740-3748.
[0292] 81 Protein Sequence Identification Number GI: 111118976.
[0293] 82 Benlalam, H. et al. (2003) Identification of five new HLA-B*3501-restricted epitope derived from common melanoma-associated antigens, spontaneously recognized by tumor-infiltrating lymphocytes. J. Immunol, 171:6283-9.
[0294] 83 Butterfield L H, et al. (1999) Generation of human T-cell responses to an HLAA2.1-restricted peptide epitope derived from alpha-fetoprotein. Cancer Res. 59:3134.
[0295] 84 Domenech N, et al. (1995) Identification of an HLA-A11-restricted epitope from the tandem repeat domain of the epithelial tumor antigen mucin. J. Immunol. 155:4766-74.
[0296] 85 Fisk B, et al. (1995) Identification of an immunodominant peptide of HER-2/neuprotooncogene recognized by ovarian tumor-specific cytotoxic T lymphocyte lines. J Exp Med. 181:2109.
[0297] 86 Gaugler B, et al. (1994) Human gene MAGE-3 codes for an antigen recognized on a melanoma by autologous cytolytic T lymphocytes. J. Exp. Med. 179:921-30.
[0298] 87 Germain J P F, et al. (1995) T-helper epitopes of the E7 transforming protein of cervical cancer associated human papillomavirus type 18 (HPV18). Virus Research 36:1-13.
[0299] 88 Gritzapis A D, et al. (2005) Pooled peptides from HER-2/neu-overexpressing primary ovarian tumours induce CTL with potent antitumour responses in vitro and in vivo. Br. J. Cancer, 92:72-9.
[0300] 89 Kono K, et al. (1998) Identification of HER2/neu-derived peptide epitopes recognized by gastric cancer-specific cytotoxic T lymphocytes. Int. J. Cancer 78:202
[0301] 90 Liu K J, et al. (2004) Generation of carcinoembryonic antigen (CEA)-specific T-cell responses in HLA-A-A*0201 and HLA-A*2402 late-stage colorectal cancer patients after vaccination with dendritic cells loaded with CEA peptides. Clin. Cancer Res. 10:2645-51.
[0302] 91 Mincheff M, et al. (2005) Depletion of CD25+ cells from human T-cell enriched fraction eliminates immunodominance during priming with dendritic cells genetically modified to express a secreted protein. Cancer Gene Ther. 12:185-97.
[0303] 92 Parkhurst M R, et al. (1998) Identification of a shared HLA-A*0201-restricted T-cell epitope from the melanoma antigen tyrosinase-related protein 2. Cancer Res. 58:4895-901.
[0304] 93 Siegel S, et al. (2006) Identification of HLA-A*0201-presented T cell epitopes derived from the oncofetal antigen-immature laminin receptor protein in patients with hematological malignancies. J. Immunol. 176:6935-44.
[0305] 94 Tanzarella S, et al. (1999) Identification of a promiscuous T-Cell epitope encoded by multiple members of the MAGE family. Cancer Res. 59:2668-74.
[0306] 95 Tatsumi T, et al. (2003) MAGE-6 encodes HLA-DRB1*401-presented epitopes recognized by CD4+ T cells from patients with melanoma or renal cell carcinoma. Clin. Cancer Res. 9:947-54.
   Items 96-107 shown by the following accession numbers are available from “The NCBI handbook [Internet]. Bethesda (Md.): National Library of Medicine (US), National Center for Biotechnology Information: 2002 October Chapter 18, The Reference Sequence (RefSeq) Project. Available from http://www.ncbi.nlm.nig.gov/entrez/query.fcgi?db=Books.”
[0307] 96 Accession Number: NP_{—}001125.1
[0308] 97 Accession Number: NP_{—}004354.2
[0309] 98 Accession Number: AAA75493.1
[0310] 99 Accession Number: ADH94043.1
[0311] 100 Accession Number: P08865
[0312] 101 Accession Number: NP_{—}786885.1
[0313] 102 Accession Number: NP_{—}005353.1
[0314] 103 Accession Number: NP_{—}001090.2
[0315] 104 Accession Number: NP_{—}001639.1
[0316] 105 Accession Number: NP_{—}002447.4
[0317] 106 Accession Number: NP_{—}002448.2
[0318] 107 Accession Number: NP_{—}001913.2
[0319] 108 Wang R F, et al. (1996) Utilization of an alternative open reading frame of a normal gene in generating a novel human cancer antigen. J. Exp. Med. 183:1131-40.
[0320] 109 Scardion A, Alves P et al. 2001. Identification of HER-2/neu immunogenic epitopes presented by renal cell carcinoma and other human epithelial tumors. Eur J Immunol 31: 3261-3270.
[0321] 110 Jing Li, et al. A Bioinformatics Workflow for Variant Peptide Detection in Shotgun. Proteomics. (in Press, Published Mar. 9, 2011 as Manuscript M110.006536).
[0322] 111 Atsuhiko Toyama, et al Deglycosylation and label-free quantitative LC-MALDI MS applied to efficient serum biomarker discovery of lung cancer. Proteome Science 2011, 9:18.
[0323] 112 Wei-Chao Change et al Observation of Peptide differences between cancer and control in gastric juice. Proteomics Clinical Application 2008: 2, 55-62.
[0324] 113 Chaunya Sun et al. Periostin identified as a potential biomarker of prostate cancer by iTRAQ-proteomics analysis of prostate biopsy. Proteome Sciences 2011, 9:22.
[0325] 114 Chan, P. K. S. et al. T-cell Response to Human Papilomavirus Type 52 L1, E6 and E7 Peptides in women with Transient Infection. Cervical Intraepithelial Neoplasma, and Invasive Cancer. Journal of Medical Virology 2011, 83:1023-1030.
[0326] Items 115-134 shown by the following accession numbers are available from “The NCBI handbook [Internet] Bethesda (Md.): National Library of Medicine (US). National Center for Biotechnology Information: 2002 October Chapter 18. The Reference Sequence (RefSeq) Project. Available from http://www.ncbi.nlm.nig.gov/entrez/query.fegi?db=Books.”
[0327] 115 Protein Sequence Identification Number GI:5533332
[0328] 116 Protein Sequence Identification Number GI:306840
[0329] 117 Protein Sequence Identification Number GI:119370332
[0330] 118 Protein Sequence Identification Number GI:156187070
[0331] 119 Protein Sequence Identification Number GI:397038
[0332] 120 Protein Sequence Identification Number GI:327200633
[0333] 121 Protein Sequence Identification Number GI:223869081
[0334] 122 Protein Sequence Identification Number GI:119592329
[0335] 123 Protein Sequence Identification Number GI:119599607
[0336] 124 Protein Sequence Identification Number GI:282160147
[0337] 125 Protein Sequence Identification Number GI:62898243
[0338] 126 Protein Sequence Identification Number GI:194388772
[0339] 127 Protein Sequence Identification Number GI:270346336
[0340] 128 Protein Sequence Identification Number GI:180211
[0341] 129 Protein Sequence Identification Number GI:119576392
[0342] 130 Protein Sequence Identification Number GI:221043556
[0343] 131 Protein Sequence Identification Number GI:119615441
[0344] 132 Protein Sequence Identification Number GI:194391112
[0345] 133 Protein Sequence Identification Number GI:226192647
[0346] 134 Protein Sequence Identification Number GI:4503119

We claim:

1. A peptide for directing an immune response in a subject as a vaccine or to modulate immune response in an autoimmune disease or cancer, or for maturing dendritic cells, comprising a peptide construct having the formula P₁-x-P₂ or P₂-x-P₁, wherein
P₂ represents a specific antigenic peptide competent for recognition by a class or subclass of immune cells or binding to an antibody;
P₁ represents an immunomodulatory peptide which is a portion of an immunoprotein capable of promoting binding to a class or subclass of immune cells and directing a subsequent immune response to the peptide P₂; and
x represents a covalent bond or a divalent linking group,
wherein the peptide P₂ is derived from a cancer cell or derived from a protein involved in an autoimmune disease.

2. The peptide of claim 1, wherein the peptide construct is selected from the group consisting of SEQ ID No.'s 192, 293, 315, 317, 319, 325, 331, 339, 341, 347, 355, 782, 786, 804, 828, 856-866, 867-879, 881, 883-884, 886-895, 897, 899-94, 906-916, 964-966, and 1045-1090 or a variant thereof.

3. The peptide of claim 1, wherein the peptide P₂ is selected from the group consisting of SEQ ID No.'s 1, 2, 3, 19, 51, 53, 72, 74, 76, 78, 80, 82, 84, 86, 88, 90, 92, 98, 103, 449, 452, 469, 474, 477, 482, 487, 490, 493, 496, 499, 524, 527, 549, 552, 555, 572, 581, 588, 597, 606, 609, 612, 623, 636, 641, 653, 664, 737, 738, 749, 751, 753, 755, 774, 812, 917-922, 924-925, 927-951, 957-963 and 967-1044 or a variant thereof and the peptide P₁ is selected from the group consisting of SEQ ID No.'s 4-6, 13, 15, 27, 48 and 49 or a variant thereof.

4. The peptide of claim 1, wherein the peptide P₂ is selected from one of the following groups: the group consisting of SEQ ID No's, 55, 80, 82 and 88; the group consisting of SEQ ID No.'s 482, 812 and 962-963; and the group consisting of SEQ ID No.'s 981 and 1024, or variants of any of the foregoing sequences.

5. The peptide of claim 1, wherein the peptide construct is selected from one of the following groups: the group consisting of SEQ ID No.'s 856 and 864-866; the group consisting of SEQ ID No.'s 828, 873 and 966; and SEQ ID No. 1059, or variants of any of the foregoing sequences.

6. The peptide of claim 1, wherein the peptide P₂ is derived from a protein expressed by a cancer cell.

7. The peptide of claim 1, wherein the divalent linker comprises one or more glycine residues.

8. A method for targeting matured dendritic cells to a site of one or more tumor cells in a subject or the site of an autoimmune process in a subject, comprising:
contacting immature dendritic cells or monocytes with a peptide construct ex vivo under conditions suitable for maturation of the cells to form the matured dendritic cells; and
administering an effective amount of the matured dendritic cells to the subject,
wherein a majority of the matured dendritic cells administered to the subject locate to the site of one or more cancer cells or the site of an autoimmune process, and
wherein the matured dendritic cells are labeled with a tracking marker allowing for detection of the matured dendritic cells.

9. The method of claim 8, wherein the peptide construct has the formula P₁-x-P₂ or P₂-x-P₁, wherein
P₂ represents a specific antigenic peptide derived from a cancer cell or derived from a protein involved in an autoimmune disease competent for recognition by a class or subclass of immune cells of binding to an antibody;
P₁ represents an immunomodulatory peptide which is a portion of an immunoprotein capable of promoting binding to a class or subclass of immune cells and modulating a subsequence immune response to the peptide P₂; and
x represents a covalent bond or a divalent linking group.

10. The method of claim 8, wherein the peptide construct is selected from the group consisting of SEQ ID No.'s 291, 293, 315, 317, 319, 325, 331, 339, 341, 347, 355, 782, 786, 804, 828, 856-866, 867-879, 881, 883-884, 886-895, 897, 899-904, 906-916, 964-966 and 1045-1090 or a variant thereof.

11. The method of claim 8, wherein the site of one or more cancer cells is detected in the subject by observing the matured dendritic cells concentrated in a location, tissue type or organ structure of the subject's body.

12. The method of claim 8, wherein the tracking marker is selected from the group consisting of a radionuclide, a luminescence dye and a fluorescent dye.

13. The method of claim 8, wherein the immature dendritic cells or monocytes are collected from the subject, and where the cells after maturation are introduced back into the subject in an autologous fashion.

14. The method of claim 8, wherein the tracing marker is conjugated to the matured dendritic cells with an antibody.

15. The method of claim 12, wherein the radionuclide is selected from the group consisting of ¹⁸F, ³²P, ⁶¹Cu, ⁹⁰Y, ^{99m}Tc, ¹³¹I, ¹²⁵I, ⁸⁰Zr, ¹¹¹In, ¹⁸⁸Re, and ¹⁷⁷Lu and the luminescence or fluorescent dye is selected from the group consisting of N, N′-di-carboxypentyl-indodicarbocyamino-5,5′-disulfonic acid (Cy5.5), Alexa Fluor probes (Alexa), carboxyfluorescein succinimidyl ester (CFSE), 4-N(S-glutathionylacetylaminophenyl)arsenoxide-Cy5.5, 2,3-dicyanonaphthalene-Cy5.5, 4-N(S-glutathionylacetylaminophenyl)arsenoxide-Alexa, 4-N(S-glutathionylacetylaminophenyl)arsenoxide-CSFE, 2,3-dicyanonaphthalene-Alexa, 2,3-dicyanonaphthalene-CSFE, and other near-infrared probes.

16. A method for delivering a therapeutic agent to a site of one or more cancer cells in a subject the site of an autoimmune process, comprising:
contacting immature dendritic cells or monocytes with a peptide construct ex vivo under conditions suitable for maturation of the cells to form the matured dendritic cells; and
administering an effective amount of the matured dendritic cells to the subject,
wherein a majority of the matured dendritic cells administered to the subject locate to the site of one or more cancer cells or the site of an autoimmune process, and
wherein the matured dendritic cells are conjugated to a therapeutic agent.

17. The method of claim 16, wherein the peptide construct has the formula P₁-x-P₂ or P₂-x-P₁, wherein
P₂ represents a specific antigenic peptide derived from a cancer cell or derived from a protein involved in an autoimmune disease competent for recognition by a class or subclass of immune cells or binding to an antibody;
P₁ represents an immunomodulatory peptide which is a portion of an immunoprotein capable of promoting binding to a class or subclass of immune cells and modulating a subsequent immune response to the peptide P₂; and
x represents a covalent bond or a divalent linking group.

18. The method of claim 16, wherein the peptide construct is selected from the group consisting of SEQ ID No.'s 291, 293, 315, 317, 319, 325, 331, 339, 341, 347, 355, 782, 786, 804, 828, 856-866, 867-879, 881, 883-884, 886-895, 897, 899-904, 906-916, 964-966 and 1045-1090 or a variant thereof.

19. The method of claim 16, wherein the immature dendritic cells or monocytes are collected from the subject, and where the cells after maturation are introduced back into the subject in an autologous fashion.

20. The method of claim 16, wherein the therapeutic agent is conjugated to the matured dendritic cells with an antibody.

21. The method of claim 16, wherein the therapeutic agent is one or more selected from the group consisting of aerostation. MMAE, ozogamicin, emtansine, and gelonin; a toxin selected from the group consisting of SEB superantigen or Saporin; a cytokine such as interferon-α; a microtubule inhibitor, an antimitotic agent, a maytansinoid, a receptor tryosine kinase inhibitor, and a phosphoinositide 3-kinase inhibitor.

22. The method of claim 16, wherein the peptide construct is conjugated to the therapeutic agent.

23. A method for vaccinating a subject, comprising:
administering an effective amount of a peptide construct optionally with an adjuvant to the subject or administering an effective amount of matured dendritic cells to the subject, wherein
the peptide construct has the formula P₁-x-P₂ or P₂-x-P₁, wherein P₂ represents a specific antigenic peptide derived from a cancer cell competent for recognition by a class or subclass of immune cells or binding to an antibody. P₁ represents an immunomodulatory peptide which is a portion of an immunoprotein capable of promoting binding to a class or subclass of immune cells and directing a subsequent immune response to the peptide P₂ and x repreents a covalent bond or a divalent linking froup, wherein the peptide P₂ is derived from an infectious, viral, bacterial, parasitic disease causing agent; and
the matured dendritic cells are formed by contacting immature dendritic cells or monocytes with the peptide construct having the formula P₁-x-P₂ or P₂-x-P₁ under conditions suitable for maturation of the cells to form matured dendritic cells,
wherein the peptide construct or the matured dendritic cells are administered to the subject prophylactically.

24. The method of claim 23, wherein the immature dendritic cells or monocytes are collected from the subject, and where the cells after maturation are introduced back into the subject in an autologous fashion.

25. The method of claim 23, wherein the peptide P₂ is selected from the group consisting of SEQ ID No.'s 967-1044 or a variant thereof and the peptide P₁ is selected from the group consisting of SEQ ID No.'s 4-6, 13, 15, 27, 48 and 49 or a variant thereof.

26. The method of claim 23, wherein the peptide construct is selected from the group consisting of SEQ ID No.'s 1045-1090.

27. The method of claim 23, wherein the immature dendritic cells or monocytes are collected from the subject, and where the cells after maturation are introduced back into the subject in an autologous fashion.

28. The method of claim 23, wherein the peptide construct is administered with an adjuvant that is selected from the group consisting of Freund's incomplete adjuvant, a lipsomal adjuvant, and a water-in-oil or a water-in-oil-in-water formulation.

29. A method of modulating an immune response in a subject, comprising:
administering an effective amount of a peptide construct optionally with an adjuvant to the subject or administering an effective amount of matured dendritic cells to the subject, wherein
the peptide construct has the formula P₁-x-P₂ or P₂-x-P₁, wherein P₂ represents a specific antigenic peptide derived from a protein involved in an autoimmune disease competent for recognition by a class or subclass of immune cells or binding to an antibody, P₁ represents an immunomodulatory peptide which is a portion of an immunoprotein capable of promoting binding to a class or subclass of immune cells and directing a subsequent immune response to the peptide P₁, and x represents a covalent bond or a divalent linking group, wherein the peptide P₂ is derived from an influenza virus; and
the matured dendritic cells are formed by contacting immature dendritic cells or monocytes with the peptide construct having the formula P₁-x-P₂ or P₂-x-P₁ under conditions suitable for maturation of the cells to form matured dendritic cells,
wherein the peptide construct or the matured dendritic cells are administered to the subject having an autoimmune disease or condition.

30. The method of claim 29, wherein the immature dendritic cells or monocytes are collected from the subject, and where the cells after maturation are introduced back into the subject in an autologous fashion.

31. The method of claim 29, wherein the peptide P₂ is selected from the group consisting of SEQ ID No.'s 1, 2, 3, 19, 51, 53, 55, 72, 74, 76, 78, 80, 82, 84, 86, 88, 90, 92, 98, 103, 449, 452, 469, 474, 482, 487, 490, 493, 496, 499, 524, 527, 549, 552, 555, 572, 581, 588, 597, 606, 609, 612, 623, 636, 641, 653, 665, 737, 738, 749, 751, 753, 755, 774, 812, 917-922, 924-925, 927-951, and 957-963 or a variant thereof and the peptide P₁ is selected from the group consisting of SEQ ID No.'s 4-6, 13, 15, 27, 48 and 49 or a variant thereof.

32. The method of claim 29, wherein the peptide construct is selected from the group consisting of SEQ ID No.'s 291, 293, 315, 317, 319, 325, 331, 339, 341, 347, 355, 782, 786, 804, 828, 856-866, 867-879, 881, 883-884, 886-895, 897, 899-904, 906-916 and 964-966.

33. The method of claim 29, wherein the immature dendritic cells of monocytes are collected from the subject, and where the cells after maturation are introduced back into the subject in an autologous fashion.

The application's sequence listing, which the Patent Office published only in electronic form, follows.

SEQUENCE LISTING (1091 sequences)

SEQ ID NO: 1 - protein, 13 aa, Homo sapiens
IAGFKGEQGPKGE

SEQ ID NO: 2 - protein, 8 aa, Homo sapiens
KNIVTPRT

SEQ ID NO: 3 - protein, 15 aa, Homo sapiens
GDKVSFFCKNKEKKC

SEQ ID NO: 4 - protein, 17 aa, Artificial Sequence
  peptide construct
VLWKKQKDKVAELENSE

SEQ ID NO: 5 - protein, 11 aa, Artificial Sequence
  peptide construct
PSTHVLITHTI

SEQ ID NO: 6 - protein, 15 aa, Artificial Sequence
  peptide construct
DFLPHYKNTSLGHRP

SEQ ID NO: 7 - protein, 4 aa, Artificial Sequence
  peptide construct
GGGS

SEQ ID NO: 8 - protein, 5 aa, Artificial Sequence
  peptide construct
GGGSS

SEQ ID NO: 9 - protein, 5 aa, Artificial Sequence
  peptide construct
GGGGS

SEQ ID NO: 10 - protein, 6 aa, Artificial Sequence
  peptide construct
GGGGSS

SEQ ID NO: 11 - protein, 8 aa, Artificial Sequence
  peptide construct
GGGSGGGS

SEQ ID NO: 12 - protein, 8 aa, Artificial Sequence
  peptide construct
LRGGGGSS

SEQ ID NO: 13 - protein, 9 aa, Artificial Sequence
  peptide construct
VQGEESNDK

SEQ ID NO: 14 - protein, 37 aa, Artificial Sequence
  peptide construct
NGQEEKAGVVSTGLIGGGDSAFDVLSFTAEEKAGVYK

SEQ ID NO: 15 - protein, 15 aa, Homo sapiens
NGQEEKAGVVSTGLI

SEQ ID NO: 16 - protein, 19 aa, Artificial Sequence
  peptide construct
DSAFDVLSFTAEEKAGVYK

SEQ ID NO: 17 - protein, 60 aa, Artificial Sequence
  peptide construct
VLWKKQKDKVAELENSEGGGGSQAFTLLPSGDALPSLLRGGGGSSQVRLQPRGMGAHSPG

SEQ ID NO: 18 - protein, 9 aa, Artificial Sequence
  peptide construct
AYMTMKIRN

SEQ ID NO: 19 - protein, 17 aa, Artificial Sequence
  peptide construct
EIIVTHFPFDEQNCSMK

SEQ ID NO: 20 - protein, 31 aa, Artificial Sequence
  peptide construct
AYMTMKIRNGGGGSEIIVTHFPFDEQNCSMK

SEQ ID NO: 21 - protein, 7 aa, Artificial Sequence
  peptide construct
DQTQDTE

SEQ ID NO: 22 - protein, 29 aa, Artificial Sequence
  peptide construct
DQTQDTEGGGGSEIIVTHFPFDEQNCSMK

SEQ ID NO: 23 - protein, 27 aa, Artificial Sequence
  peptide construct
PSTHVLITHTIGGGIAGFKGEQGPKGE

SEQ ID NO: 24 - protein, 31 aa, Artificial Sequence
  peptide construct
DFLPHYKNTSLGHRPGGGIAGFKGEQGPKGE

SEQ ID NO: 25 - protein, 33 aa, Artificial Sequence
  peptide construct
NGQEEKAGVVSTGLIGGGGSIAGFKGEQGPKGE

SEQ ID NO: 26 - protein, 32 aa, Artificial Sequence
  peptide construct
DGQEEKAGVVSTGLIGGGGSIAGFKGEQGPKG

SEQ ID NO: 27 - protein, 31 aa, Homo sapiens
DNQLLETCKQDRLRNRRGNGSSTHFEGNLPC

SEQ ID NO: 28 - protein, 55 aa, Artificial Sequence
  peptide construct
DNQLLETCKQDRLRNRRGNGSSTHFEGNLPCGGGGSDSAFDVLSFTAEEKAGVYK

SEQ ID NO: 29 - protein, 26 aa, Artificial Sequence
  peptide construct
DQTQDTEGGGGSSVHFFKNIVTPRTP

SEQ ID NO: 30 - protein, 28 aa, Artificial Sequence
  peptide construct
DQTQDTEGGGGSSGDKVSFFCKNKEKKC

SEQ ID NO: 31 - protein, 30 aa, Artificial Sequence
  peptide construct
DQTQDTEGGGGSSYQQLNSERGVPNENIEN

SEQ ID NO: 32 - protein, 42 aa, Artificial Sequence
  peptide construct
VLWKKQKDKVAELENSEGGGGSSIQTQMKTYSDIDGKLVSEV

SEQ ID NO: 33 - protein, 36 aa, Artificial Sequence
  peptide construct
VLWKKQKDKVAELENSEGGGGSSVFIKRVSNVIIHG

SEQ ID NO: 34 - protein, 38 aa, Artificial Sequence
  peptide construct
VLWKKQKDKVAELENSEGGGGSSIASRRVDGIIAAYQN

SEQ ID NO: 35 - protein, 38 aa, Artificial Sequence
  peptide construct
VLWKKQKDKVAELENSEGGGGSSMKVTVAFNQFGPNRR

SEQ ID NO: 36 - protein, 42 aa, Artificial Sequence
  peptide construct
VLWKKQKDKVAELENSEGGGGSSIDIFASKNFHLQKNTIGTG

SEQ ID NO: 37 - protein, 35 aa, Artificial Sequence
  peptide construct
VLWKKQKDKVAELENSEGGGGSSYFVGKMYFNLID

SEQ ID NO: 38 - protein, 38 aa, Artificial Sequence
  peptide construct
DQTQDTEGGGGSSGIGAVLKVLTTGPALISWIKRKRQQ

SEQ ID NO: 39 - protein, 13 aa, Artificial Sequence
  peptide construct
VHFFKNIVTPRTP

SEQ ID NO: 40 - protein, 17 aa, Artificial Sequence
  peptide construct
YQQLNSERGVPNENIEN

SEQ ID NO: 41 - protein, 19 aa, Artificial Sequence
  peptide construct
IQTQMKTYSDIDGKLVSEV

SEQ ID NO: 42 - protein, 13 aa, Artificial Sequence
  peptide construct
VFIKRVSNVIIHG

SEQ ID NO: 43 - protein, 15 aa, Artificial Sequence
  peptide construct
MKVTVAFNQFGPNRR

SEQ ID NO: 44 - protein, 15 aa, Artificial Sequence
  peptide construct
IASRRVDGIIAAYQN

SEQ ID NO: 45 - protein, 19 aa, Artificial Sequence
  peptide construct
IDIFASKNFHLQKNTIGTG

SEQ ID NO: 46 - protein, 12 aa, Artificial Sequence
  peptide construct
YFVGKMYFNLID

SEQ ID NO: 47 - protein, 25 aa, Artificial Sequence
  peptide construct
GIGAVLKVLTTGPALISWIKRKRQQ

SEQ ID NO: 48 - protein, 15 aa, Homo sapiens
DGQEEKAGVVSTGLI

SEQ ID NO: 49 - protein, 13 aa, Homo sapiens
DLLKNGERIEKVE

SEQ ID NO: 50 - protein, 12 aa, Artificial Sequence
  peptide construct
GGGSGTGSGSGS

SEQ ID NO: 51 - protein, 40 aa, Homo sapiens
DAEFRHDSGYEVHHQKLVFFAEDVGSNKGAIIGLMVGGVV

SEQ ID NO: 52 - protein, 40 aa, Artificial
  peptide construct
  MISC_FEATURE (1)..(1): X is D and E for acidic amino acids
  MOD_RES (1)..(1): ACETYLATION
  MISC_FEATURE (2)..(2): X is A or G
  MISC_FEATURE (3)..(3): X is D and E for acidic amino acids
  MISC_FEATURE (4)..(4): X is F, W or Y for aromatic amino acids
  MISC_FEATURE (5)..(5): X is K, R or H for basic amino acids
  MISC_FEATURE (6)..(6): X is K, R or H for basic amino acids
  MISC_FEATURE (7)..(7): X is D and E for acidic amino acids
  MISC_FEATURE (8)..(8): X is T or S
  MISC_FEATURE (9)..(9): X is A or G
  MISC_FEATURE (10)..(10): X is F, W or Y for aromatic amino acids
  MISC_FEATURE (11)..(11): X is D and E for acidic amino acids
  MOD_RES (11)..(11): 4Abu
  MISC_FEATURE (12)..(12): X is I, L or V
  MISC_FEATURE (13)..(13): X is K, R or H for basic amino acids
  MISC_FEATURE (14)..(14): X is K, R or H for basic amino acids
  MISC_FEATURE (15)..(15): X is N or Q for amidated amino acids
  MISC_FEATURE (16)..(16): X is K, R or H for basic amino acids
  MISC_FEATURE (17)..(17): X is I, L or V
  MOD_RES (17)..(17): 4Abu
  MISC_FEATURE (18)..(18): X is I, L or V
  MISC_FEATURE (19)..(19): X is F, W or Y for aromatic amino acids
  MISC_FEATURE (20)..(20): X is F, W or Y for aromatic amino acids
  MISC_FEATURE (21)..(21): X is A or G
  MISC_FEATURE (22)..(22): X is D and E for acidic amino acids
  MOD_RES (22)..(22): GAMMA-CARBOXYGLUTAMIC ACID HYDROXYLATION
  MISC_FEATURE (23)..(23): X is D and E for acidic amino acids
  MISC_FEATURE (24)..(24): X is I, L or V
  MISC_FEATURE (25)..(25): X is A or G
  MISC_FEATURE (26)..(26): X is C or S
  MISC_FEATURE (27)..(27): X is N or Q for amidated amino acids
  MISC_FEATURE (28)..(28): X is K, R or H for basic amino acids
  MISC_FEATURE (29)..(29): X is A or G
  MISC_FEATURE (30)..(30): X is A or G
  MISC_FEATURE (31)..(31): X is I, L or V
  MOD_RES (31)..(31): 4Abu
  MISC_FEATURE (32)..(32): X is I, L or V
  MISC_FEATURE (33)..(33): X is A or G
  MISC_FEATURE (34)..(34): X is I, L or V
  MISC_FEATURE (35)..(35): X is M or Nle
  MISC_FEATURE (36)..(36): X is I, L or V
  MISC_FEATURE (37)..(37): X is A or G
  MISC_FEATURE (38)..(38): X is A or G
  MISC_FEATURE (39)..(39): X is I, L or V
  MOD_RES (39)..(39): 4Abu
  MISC_FEATURE (40)..(40): X is I, L or V
XXXXXXXXXXXXXXXXXXXXXXXXXXXXXXXXXXXXXXXX

SEQ ID NO: 53 - protein, 28 aa, Homo sapiens
DAEFRHDSGYEVHHQKLVFFAENVGSNK

SEQ ID NO: 54 - protein, 28 aa, Artificial
  peptide construct
  MISC_FEATURE (1)..(1): X is D and E for acidic amino acids
  MOD_RES (1)..(1): ACETYLATION
  MISC_FEATURE (2)..(2): X is A or G
  MISC_FEATURE (3)..(3): X is D and E for acidic amino acids
  MISC_FEATURE (4)..(4): X is F, W or Y for aromatic amino acids
  MISC_FEATURE (5)..(5): X is K, R or H for basic amino acids
  MISC_FEATURE (6)..(6): X is K, R or H for basic amino acids
  MISC_FEATURE (7)..(7): X is D and E for acidic amino acids
  MISC_FEATURE (8)..(8): X is T or S
  MISC_FEATURE (9)..(9): X is A or G
  MISC_FEATURE (10)..(10): X is F, W or Y for aromatic amino acids
  MISC_FEATURE (11)..(11): X is D and E for acidic amino acids
  MOD_RES (11)..(11): 4Abu
  MISC_FEATURE (12)..(12): X is I, L or V
  MISC_FEATURE (13)..(13): X is K, R or H for basic amino acids
  MISC_FEATURE (14)..(14): X is K, R or H for basic amino acids
  MISC_FEATURE (15)..(15): X is N or Q for amidated amino acids
  MISC_FEATURE (16)..(16): X is K, R or H for basic aminio acids
  MISC_FEATURE (17)..(17): X is I, L or V
  MOD_RES (17)..(17): 4Abu
  MISC_FEATURE (18)..(18): X is I, L or V
  MISC_FEATURE (19)..(19): X is F, W or Y for aromatic amino acids
  MISC_FEATURE (20)..(20): X is F, W or Y for aromatic amino acids
  MISC_FEATURE (21)..(21): X is A or G
  MISC_FEATURE (22)..(22): X is D and E for acidic amino acids
  MOD_RES (22)..(22): 4Abu
  MOD_RES (22)..(22): GAMMA-CARBOXYGLUTAMIC ACID HYDROXYLATION
  MISC_FEATURE (23)..(23): X is D and E for acidic amino acids
  MISC_FEATURE (24)..(24): X is I, L or V
  MISC_FEATURE (25)..(25): X is A or G
  MISC_FEATURE (26)..(26): X is C or S
  MISC_FEATURE (27)..(27): X is N or Q for amidated amino acids
  MISC_FEATURE (28)..(28): X is K, R or H for basic amino acids
XXXXXXXXXXXXXXXXXXXXXXXXXXXX

SEQ ID NO: 55 - protein, 30 aa, Homo sapiens
DAEFRHDSGYEVHHQKLVFFAENVGSNKAI

SEQ ID NO: 56 - protein, 30 aa, Artificial
  peptide construct
  MISC_FEATURE (1)..(1): X is D and E for acidic amino acids
  MOD_RES (1)..(1): ACETYLATION
  MISC_FEATURE (2)..(2): X is A or G
  MISC_FEATURE (3)..(3): X is D and E for acidic amino acids
  MISC_FEATURE (4)..(4): X is F, W or Y for aromatic amino acids
  MISC_FEATURE (5)..(5): X is K, R or H for basic amino acids
  MISC_FEATURE (6)..(6): X is K, R or H for basic amino acids
  MISC_FEATURE (7)..(7): X is D and E for acidic amino acids
  MISC_FEATURE (8)..(8): X is T or S
  MISC_FEATURE (9)..(9): X is A or G
  MISC_FEATURE (10)..(10): X is F, W or Y for aromatic amino acids
  MISC_FEATURE (11)..(11): X is D and E for acidic amino acids
  MOD_RES (11)..(11): 4Abu
  MISC_FEATURE (12)..(12): X is I, L or V
  MISC_FEATURE (13)..(13): X is K, R or H for basic amino acids
  MISC_FEATURE (14)..(14): X is K, R or H for basic amino acids
  MISC_FEATURE (15)..(15): X is N or Q for amidated amino acids
  MISC_FEATURE (16)..(16): X is K, R or H for basic amino acids
  MISC_FEATURE (17)..(17): X is I, L or V
  MOD_RES (17)..(17): 4Abu
  MISC_FEATURE (18)..(18): X is I, L or V
  MISC_FEATURE (19)..(19): X is F, W or Y for aromatic amino acids
  MISC_FEATURE (20)..(20): X is F, W or Y for aromatic amino acids
  MISC_FEATURE (21)..(21): X is A or G
  MISC_FEATURE (22)..(22): X is D and E for acidic amino acids
  MOD_RES (22)..(22): 4Abu
  MOD_RES (22)..(22): GAMMA-CARBOXYGLUTAMIC ACID HYDROXYLATION
  MISC_FEATURE (23)..(23): X is D and E for acidic amino acids
  MISC_FEATURE (24)..(24): X is I, L or V
  MISC_FEATURE (25)..(25): X is A or G
  MISC_FEATURE (26)..(26): X is C or S
  MISC_FEATURE (27)..(27): X is N or Q for amidated amino acids
  MISC_FEATURE (28)..(28): X is K, R or H for basic amino acids
  MISC_FEATURE (29)..(29): X is A or G
  MISC_FEATURE (30)..(30): X is I, L or V
XXXXXXXXXXXXXXXXXXXXXXXXXXXXXX

SEQ ID NO: 57 - protein, 11 aa, Artificial
  Completely synthesized peptide construct
DAEFRHDSGYE

SEQ ID NO: 58 - protein, 11 aa, Artificial
  peptide construct
  MISC_FEATURE (1)..(1): X is D and E for acidic amino acids
  MOD_RES (1)..(1): ACETYLATION
  MISC_FEATURE (2)..(2): X is A or G
  MISC_FEATURE (3)..(3): X is D and E for acidic amino acids
  MISC_FEATURE (4)..(4): X is F, W or Y for aromatic amino acids
  MISC_FEATURE (5)..(5): X is K, R or H for basic amino acids
  MISC_FEATURE (6)..(6): X is K, R or H for basic amino acids
  MISC_FEATURE (7)..(7): X is D and E for acidic amino acids
  MISC_FEATURE (8)..(8): X is T or S
  MISC_FEATURE (9)..(9): X is A or G
  MISC_FEATURE (10)..(10): X is F, W or Y for aromatic amino acids
  MISC_FEATURE (11)..(11): X is D and E for acidic amino acids
XXXXXXXXXXX

SEQ ID NO: 59 - protein, 7 aa, Artificial
  Completely synthesized peptide construct
ENVGSNK

SEQ ID NO: 60 - protein, 7 aa, Artificial
  peptide construct
  MISC_FEATURE (1)..(1): X is D and E for acidic amino acids
  MOD_RES (1)..(1): ACETYLATION
  MOD_RES (1)..(1): 4Abu
  MOD_RES (1)..(1): 4Abu
  MOD_RES (1)..(1): GAMMA-CARBOXYGLUTAMIC ACID HYDROXYLATION
  MISC_FEATURE (2)..(2): X is D and E for acidic amino acids
  MISC_FEATURE (3)..(3): X is I, L or V
  MISC_FEATURE (4)..(4): X is A or G
  MISC_FEATURE (5)..(5): X is C or S
  MISC_FEATURE (6)..(6): X is N or Q for amidated amino acids
  MISC_FEATURE (7)..(7): X is K, R or H for basic amino acids
XXXXXXX

SEQ ID NO: 61 - protein, 12 aa, Artificial
  Completely synthesized peptide construct
DAEFRHDSGYEV

SEQ ID NO: 62 - protein, 12 aa, Artificial
  peptide construct
  MISC_FEATURE (1)..(1): X is D and E for acidic amino acids
  MOD_RES (1)..(1): ACETYLATION
  MISC_FEATURE (2)..(2): X is A or G
  MISC_FEATURE (3)..(3): X is D and E for acidic amino acids
  MISC_FEATURE (4)..(4): X is F, W or Y for aromatic amino acids
  MISC_FEATURE (5)..(5): X is K, R or H for basic amino acids
  MISC_FEATURE (6)..(6): X is K, R or H for basic amino acids
  MISC_FEATURE (7)..(7): X is D and E for acidic amino acids
  MISC_FEATURE (8)..(8): X is T or S
  MISC_FEATURE (9)..(9): X is A or G
  MISC_FEATURE (10)..(10): X is F, W or Y for aromatic amino acids
  MISC_FEATURE (11)..(11): X is D and E for acidic amino acids
  MOD_RES (11)..(11): 4Abu
  MISC_FEATURE (12)..(12): X is I, L or V
XXXXXXXXXXXX

SEQ ID NO: 63 - protein, 10 aa, Artificial
  Completely synthesized peptide construct
DAEFRHDSGY

SEQ ID NO: 64 - protein, 10 aa, Artificial
  peptide construct
  MISC_FEATURE (1)..(1): X is D and E for acidic amino acids
  MOD_RES (1)..(1): ACETYLATION
  MISC_FEATURE (2)..(2): X is A or G
  MISC_FEATURE (3)..(3): X is D and E for acidic amino acids
  MISC_FEATURE (4)..(4): X is F, W or Y for aromatic amino acids
  MISC_FEATURE (5)..(5): X is K, R or H for basic amino acids
  MISC_FEATURE (6)..(6): X is K, R or H for basic amino acids
  MISC_FEATURE (7)..(7): X is D and E for acidic amino acids
  MISC_FEATURE (8)..(8): X is T or S
  MISC_FEATURE (9)..(9): X is A or G
  MISC_FEATURE (10)..(10): X is F, W or Y for aromatic amino acids
XXXXXXXXXX

SEQ ID NO: 65 - protein, 4 aa, Artificial
  Completely synthesized peptide construct
EFRH

SEQ ID NO: 66 - protein, 4 aa, Artificial
  peptide construct
  MISC_FEATURE (1)..(1): X is D and E for acidic amino acids
  MOD_RES (1)..(1): ACETYLATION
  MISC_FEATURE (2)..(2): X is F or P
  MISC_FEATURE (3)..(3): X is K, R or H for basic amino acids
  MISC_FEATURE (4)..(4): X is K, R or H for basic amino acids
XXXX

SEQ ID NO: 67 - protein, 19 aa, Artificial
  peptide construct
  MISC_FEATURE (1)..(1): X is D and E for acidic amino acids
  MOD_RES (1)..(1): ACETYLATION
  MISC_FEATURE (2)..(2): X is C or S
  MISC_FEATURE (3)..(3): X is A or G
  MISC_FEATURE (4)..(4): X is F, W or Y for aromatic amino acids
  MISC_FEATURE (5)..(5): X is D and E for acidic amino acids
  MOD_RES (5)..(5): GAMMA-CARBOXYGLUTAMIC ACID HYDROXYLATION
  MOD_RES (5)..(5): 4Abu
  MISC_FEATURE (6)..(6): X is I, L or V
  MISC_FEATURE (7)..(7): X is I, L or V
  MISC_FEATURE (8)..(8): X is C or S
  MISC_FEATURE (9)..(9): X is F, W or Y for aromatic amino acids
  MISC_FEATURE (10)..(10): X is T or S
  MISC_FEATURE (11)..(11): X is A or G
  MISC_FEATURE (12)..(12): X is D and E for acidic amino acids
  MOD_RES (12)..(12): 4Abu
  MISC_FEATURE (13)..(13): X is D and E for acidic amino acids
  MISC_FEATURE (14)..(14): X is K, R or H for basic amino acids
  MISC_FEATURE (15)..(15): X is A or G
  MISC_FEATURE (16)..(16): X is A or G
  MISC_FEATURE (17)..(17): X is I, L or V
  MISC_FEATURE (18)..(18): X is F, W or Y for aromatic amino acids
  MISC_FEATURE (19)..(19): X is K, R or H for basic amino acids
XXXXXXXXXXXXXXXXXXX

SEQ ID NO: 68 - protein, 14 aa, Artificial
  Completely synthesized peptide construct
  MOD_RES (1)..(1): ACETYLATION
SLKLMATLFSTYAS

SEQ ID NO: 69 - protein, 14 aa, Artificial
  Completely synthesized peptide construct
  MISC_FEATURE (1)..(1): X is C or S
  MISC_FEATURE (2)..(2): X is I, L or V
  MISC_FEATURE (3)..(3): X is K, R or H for basic amino acids
  MISC_FEATURE (4)..(4): X is I, L or V
  MISC_FEATURE (5)..(5): X is M or Nle
  MISC_FEATURE (6)..(6): X is A or G
  MISC_FEATURE (7)..(7): X is T or S
  MISC_FEATURE (8)..(8): X is I, L or V
  MISC_FEATURE (9)..(9): X is F or P
  MISC_FEATURE (10)..(10): X is C or S
  MISC_FEATURE (11)..(11): X is T or S
  MISC_FEATURE (12)..(12): X is F, W or Y for aromatic amino acids
  MISC_FEATURE (13)..(13): X is A or G
  MISC_FEATURE (14)..(14): X is C or S
XXXXXXXXXXXXXX

SEQ ID NO: 70 - protein, 14 aa, Artificial
  Completely synthesized peptide construct
  MOD_RES (1)..(1): ACETYLATION
SLKLMATLFSSYAT

SEQ ID NO: 71 - protein, 14 aa, Artificial
  Completely synthesized peptide construct
  MOD_RES (1)..(1): ACETYLATION
  MISC_FEATURE (2)..(2): X is C or S
  MISC_FEATURE (3)..(3): X is I, L or V
  MISC_FEATURE (4)..(4): X is K, R or H for basic amino acids
  MISC_FEATURE (5)..(5): X is I, L or V
  MISC_FEATURE (6)..(6): X is M or Nle
  MISC_FEATURE (7)..(7): X is A or G
  MISC_FEATURE (8)..(8): X is Tor S
  MISC_FEATURE (9)..(9): X is I, L or V
  MISC_FEATURE (10)..(10): X is F or P
  MISC_FEATURE (11)..(11): X is C or S
  MISC_FEATURE (12)..(12): X is C or S
  MISC_FEATURE (13)..(13): X is F, W or Y for aromatic amino acids
  MISC_FEATURE (14)..(14): X is A or G
  MISC_FEATURE (15)..(15): X is T or S
XXXXXXXXXXXXXX

SEQ ID NO: 72 - protein, 11 aa, Homo sapiens
NITEIADLTQK

SEQ ID NO: 73 - protein, 11 aa, Artificial
  peptide construct
  MISC_FEATURE (1)..(1): X is N or Q for amidated amino acids
  MOD_RES (1)..(1): ACETYLATION
  MISC_FEATURE (2)..(2): X is I, L or V
  MISC_FEATURE (3)..(3): X is T or S
  MISC_FEATURE (4)..(4): X is D and E for acidic amino acids
  MOD_RES (4)..(4): 4Abu
  MISC_FEATURE (5)..(5): X is I, L or V
  MISC_FEATURE (6)..(6): X is A or G
  MISC_FEATURE (7)..(7): X is D and E for acidic amino acids
  MOD_RES (7)..(7): 4Abu
  MISC_FEATURE (8)..(8): X is I, L or V
  MISC_FEATURE (9)..(9): X is T or S
  MISC_FEATURE (10)..(10): X is N or Q for amidated amino acids
  MISC_FEATURE (11)..(11): X is K, R or H for basic amino acids
XXXXXXXXXXX

SEQ ID NO: 74 - protein, 40 aa, Homo sapiens
NMYAMMIARFKMFPEVKEKGMAALPRLIAFTSEHSHFSLK

SEQ ID NO: 75 - protein, 40 aa, Artificial; identical to SEQ ID NO: 52
  peptide construct
  MISC_FEATURE (1)..(1): X is N or Q for amidated amino acids
  MOD_RES (1)..(1): ACETYLATION
  MISC_FEATURE (2)..(2): X is M or Nle
  MISC_FEATURE (3)..(3): X is F, W or Y for aromatic amino acids
  MISC_FEATURE (4)..(4): X is A or G
  MISC_FEATURE (5)..(5): X is M or Nle
  MISC_FEATURE (6)..(6): X is M or Nle
  MISC_FEATURE (7)..(7): X is I, L or V
  MISC_FEATURE (8)..(8): X is A or G
  MISC_FEATURE (9)..(9): X is K, R or H for basic amino acids
  MISC_FEATURE (10)..(10): X is F, W or Y for aromatic amino acids
  MISC_FEATURE (11)..(11): X is K, R or H for basic amino acids
  MISC_FEATURE (12)..(12): X is M or Nle
  MISC_FEATURE (13)..(13): X is F, W or Y for aromatic amino acids
  MISC_FEATURE (14)..(14): X is F or P
  MISC_FEATURE (15)..(15): X is D and E for acidic amino acids
  MOD_RES (15)..(15): 4Abu
  MISC_FEATURE (16)..(16): X is I, L or V
  MISC_FEATURE (17)..(17): X is K, R or H for basic amino acids
  MISC_FEATURE (18)..(18): X is D and E for acidic amino acids
  MISC_FEATURE (19)..(19): X is K, R or H for basic amino acids
  MISC_FEATURE (20)..(20): X is A or G
  MISC_FEATURE (21)..(21): X is M or Nle
  MISC_FEATURE (22)..(22): X is A or G
  MISC_FEATURE (23)..(23): X is A or G
  MISC_FEATURE (24)..(24): X is I, L or V
  MISC_FEATURE (25)..(25): X is F or P
  MISC_FEATURE (26)..(26): X is K, R or H for basic amino acids
  MISC_FEATURE (27)..(27): X is I, L or V
  MOD_RES (27)..(27): 4Abu
  MISC_FEATURE (28)..(28): X is I, L or V
  MISC_FEATURE (29)..(29): X is A or G
  MISC_FEATURE (30)..(30): X is F, W or Y for aromatic amino acids
  MISC_FEATURE (31)..(31): X is T or S
  MISC_FEATURE (32)..(32): X is C or S
  MISC_FEATURE (33)..(33): X is D and E for acidic amino acids
  MISC_FEATURE (34)..(34): X is K, R or H for basic amino acids
  MISC_FEATURE (35)..(35): X is C or S
  MISC_FEATURE (36)..(36): X is K, R or H for basic amino acids
  MISC_FEATURE (37)..(37): X is F, W or Y for aromatic amino acids
  MISC_FEATURE (38)..(38): X is C or S
  MISC_FEATURE (39)..(39): X is I, L or V
  MISC_FEATURE (40)..(40): X is K, R or H for basic amino acids

SEQ ID NO: 76 - protein, 34 aa, Homo sapiens
IARFKMFPEVKEKGMAALPRLIAFTSEHSHFSLK

SEQ ID NO: 77 - protein, 34 aa, Artificial
  peptide construct
  MISC_FEATURE (1)..(1): X is I, L or V
  MOD_RES (1)..(1): ACETYLATION
  MISC_FEATURE (2)..(2): X is A or G
  MISC_FEATURE (3)..(3): X is K, R or H for basic amino acids
  MISC_FEATURE (4)..(4): X is F, W or Y or aromatic amino acids
  MISC_FEATURE (5)..(5): X is K, R or H for basic amino acids
  MISC_FEATURE (6)..(6): X is M or Nle
  MISC_FEATURE (7)..(7): X is F,  W or Y for aromatic amino acids
  MISC_FEATURE (8)..(8): X is F or P
  MISC_FEATURE (9)..(9): X is D and E for acidic amino acids
  MISC_FEATURE (10)..(10): X is I, L or V
  MISC_FEATURE (11)..(11): X is K, R or H for basic amino acids
  MISC_FEATURE (12)..(12): X is D and E for acidic amino acids
  MISC_FEATURE (13)..(13): X is K, R or H for basic amino acids
  MISC_FEATURE (14)..(14): X is A or G
  MISC_FEATURE (15)..(15): X is M or Nle
  MISC_FEATURE (16)..(16): X is A or G
  MISC_FEATURE (17)..(17): X is A or G
  MISC_FEATURE (18)..(18): X is I, L or V
  MISC_FEATURE (19)..(19): X is  F or P
  MISC_FEATURE (20)..(20): X is K, R or H for basic amino acids
  MISC_FEATURE (21)..(21): X is I, L or V
  MOD_RES (21)..(21): 4Abu
  MISC_FEATURE (22)..(22): X is I, L or V
  MISC_FEATURE (23)..(23): X is A or G
  MISC_FEATURE (24)..(24): X is F, W or Y for aromatic amino acids
  MISC_FEATURE (25)..(25): X is T or S
  MISC_FEATURE (26)..(26): X is C or S
  MISC_FEATURE (27)..(27): X is D and E for acidic amino acids
  MISC_FEATURE (28)..(28): X is K, R or H for basic amino acids
  MISC_FEATURE (29)..(29): X is C or S
  MISC_FEATURE (30)..(30): X is K, R or H for basic amino acids
  MISC_FEATURE (31)..(31): X is F, W or Y for aromatic amino acids
  MISC_FEATURE (32)..(32): X is C or S
  MISC_FEATURE (33)..(33): X is C or S
  MISC_FEATURE (34)..(34): X is I, L or V
  MISC_FEATURE (35)..(35): X is K, R or H for basic amino acids
XXXXXXXXXXXXXXXXXXXXXXXXXXXXXXXXXX

SEQ ID NO: 78 - protein, 20 aa, Homo sapiens
SRLSKVAPVIKARMMEYGTT

SEQ ID NO: 79 - protein, 20 aa, Artificial
  Completely synthesized peptide construct
  MISC_FEATURE (1)..(1): X is C or S
  MOD_RES (1)..(1): ACETYLATION
  MISC_FEATURE (2)..(2): X is K, R or H for basic amino acids
  MISC_FEATURE (3)..(3): X is I, L or V
  MISC_FEATURE (4)..(4): X is C or S
  MISC_FEATURE (5)..(5): X is K, R or H for basic amino acids
  MISC_FEATURE (6)..(6): X is I, L or V
  MISC_FEATURE (7)..(7): X is A or G
  MISC_FEATURE (8)..(8): X is F or P
  MISC_FEATURE (9)..(9): X is I, L or V
  MISC_FEATURE (10)..(10): X is I, L or V
  MISC_FEATURE (11)..(11): X is K, R or H for basic amino acids
  MISC_FEATURE (12)..(12): X is A or G
  MISC_FEATURE (13)..(13): X is K, R or H for basic amino acids
  MISC_FEATURE (14)..(14): X is M or Nle
  MISC_FEATURE (15)..(15): X is M or Nle
  MISC_FEATURE (16)..(16): X is D or E for  acidic amino acids
  MISC_FEATURE (17)..(17): X is F, W or Y for aromatic amino acids
  MISC_FEATURE (18)..(18): X is A or G
  MISC_FEATURE (19)..(19): X is T or S
  MISC_FEATURE (20)..(20): X is T or S
XXXXXXXXXXXXXXXXXXXX

SEQ ID NO: 80 - protein, 19 aa, Homo sapiens
IPPSLRYLEDEERMSRLSK

SEQ ID NO: 81 - protein, 18 aa, Artificial
  peptide construct
  MISC_FEATURE (1)..(1): X is I, L or V
  MOD_RES (1)..(1): acetylation
  MOD_RES (1)..(1): GAMMA-CARBOXYGLUTAMIC ACID HYDROXYLATION
  MISC_FEATURE (2)..(2): X is F or P
  MISC_FEATURE (3)..(3): X is F or P
  MISC_FEATURE (4)..(4): X is C or S
  MISC_FEATURE (5)..(5): X is I, L or V
  MISC_FEATURE (6)..(6): X is K, R or H for basic amino acids
  MISC_FEATURE (7)..(7): X is F, W or Y for aromatic amino acids
  MISC_FEATURE (8)..(8): X is D and E for acidic amino acids
  MISC_FEATURE (9)..(9): X is D and E for acidic amino acids
  MISC_FEATURE (10)..(10): X is D and E for acidic amino acids
  MISC_FEATURE (11)..(11): X is D and E for acidic amino acids
  MISC_FEATURE (12)..(12): X is K, R or H for basic amino acids
  MISC_FEATURE (13)..(13): X is M or Nle
  MISC_FEATURE (14)..(14): X is C or S
  MISC_FEATURE (15)..(15): X is K, R or H for basic amino acids
  MISC_FEATURE (16)..(16): X is I, L or V
  MISC_FEATURE (17)..(17): X is C or S
  MISC_FEATURE (18)..(18): X is K, R or H for basic amino acids
XXXXXXXXXXXXXXXXXX

SEQ ID NO: 82 - protein, 20 aa, Homo sapiens
NTNMFTYEIAPVFVLLEYVT

SEQ ID NO: 83 - protein, 20 aa, Artificial
  peptide construct
  MISC_FEATURE (1)..(1): X is N or Q for amidated amino acids
  MOD_RES (1)..(1): ACETYLATION
  MISC_FEATURE (2)..(2): X is T or S
  MISC_FEATURE (3)..(3): X is N or Q for amidated amino acids
  MISC_FEATURE (4)..(4): X is M or Nle
  MISC_FEATURE (5)..(5): X is F, W or Y for aromatic amino acids
  MISC_FEATURE (6)..(6): X is T or S
  MISC_FEATURE (7)..(7): X is F, W or Y for aromatic amino acids
  MISC_FEATURE (8)..(8): X is D and E for acidic amino acids
  MOD_RES (8)..(8): 4Abu
  MISC_FEATURE (9)..(9): X is I, L or V
  MISC_FEATURE (10)..(10): X is A or G
  MISC_FEATURE (11)..(11): X is F or P
  MISC_FEATURE (12)..(12): X is I, L or V
  MISC_FEATURE (13)..(13): X is F, W or Y for aromatic amino acids
  MISC_FEATURE (14)..(14): X is I, L or V
  MOD_RES (14)..(14): 4Abu
  MOD_RES (14)..(14): 4Abu
  MOD_RES (14)..(14): GAMMA-CARBOXYGLUTAMIC ACID HYDROXYLATION
  MISC_FEATURE (15)..(15): X is I, L or V
  MISC_FEATURE (16)..(16): X is I, L or V
  MISC_FEATURE (17)..(17): X is D and E for acidic amino acids
  MISC_FEATURE (18)..(18): X is F, W or Y for aromatic amino acids
  MISC_FEATURE (19)..(19): X is I, L or V
  MISC_FEATURE (20)..(20): X is T or S
XXXXXXXXXXXXXXXXXXXX

SEQ ID NO: 84 - protein, 15 aa, Homo sapiens
FKADEKKFWGKYLYE

SEQ ID NO: 85 - protein, 15 aa, Artificial
  peptide construct
  MISC_FEATURE (1)..(1): X is F, W or Y for aromatic amino acids
  MOD_RES (1)..(1): ACETYLATION
  MISC_FEATURE (2)..(2): X is K, R or H for basic amino acids
  MISC_FEATURE (3)..(3): X is A or G
  MISC_FEATURE (4)..(4): X is D and E for acidic amino acids
  MOD_RES (4)..(4): 4Abu
  MISC_FEATURE (5)..(5): X is D and E for acidic amino acids
  MISC_FEATURE (6)..(6): X is K, R or H for basic amino acids
  MISC_FEATURE (7)..(7): X is K, R or H for basic amino acids
  MISC_FEATURE (8)..(8): X is F, W or Y for aromatic amino acids
  MISC_FEATURE (9)..(9): X is F, W or Y for aromatic amino acids
  MISC_FEATURE (10)..(10): X is A or G
  MISC_FEATURE (11)..(11): X is K, R or H for basic amino acids
  MISC_FEATURE (12)..(12): X is F, W or Y for aromatic amino acids
  MISC_FEATURE (13)..(13): X is I, L or V
  MISC_FEATURE (14)..(14): X is F, W or Y for aromatic amino acids
  MISC_FEATURE (15)..(15): X is D and E for acidic amino acids
XXXXXXXXXXXXXXX

SEQ ID NO: 86 - protein, 15 aa, Homo sapiens
SHLVEALYLVCGERG

SEQ ID NO: 87 - protein, 14 aa, Artificial
  peptide construct
  MISC_FEATURE (1)..(1): X is C or S
  MOD_RES (1)..(1): ACETYLATION
  MISC_FEATURE (2)..(2): X is K, R or H for basic amino acids
  MISC_FEATURE (3)..(3): X is I, L or V
  MOD_RES (3)..(3): 4Abu
  MOD_RES (3)..(3): GAMMA-CARBOXYGLUTAMIC ACID HYDROXYLATION
  MISC_FEATURE (4)..(4): X is I, L or V
  MISC_FEATURE (5)..(5): X is D and E for acidic amino acids
  MISC_FEATURE (6)..(6): X is  A or G
  MISC_FEATURE (7)..(7): X is I, L or V
  MISC_FEATURE (8)..(8): X is F, W or Y for aromatic amino acids
  MISC_FEATURE (9)..(9): X is I, L or V
  MISC_FEATURE (10)..(10): X is C or S
  MISC_FEATURE (11)..(11): X is A or G
  MISC_FEATURE (12)..(12): X is D and E for acidic amino acids
  MISC_FEATURE (13)..(13): X is K, R or H for basic amino acids
  MISC_FEATURE (14)..(14): X is A or G
XXXXXXXXXXXXXX

SEQ ID NO: 88 - protein, 24 aa, Homo sapiens
VLGGGCALLRCIPALDSLTPANED

SEQ ID NO: 89 - protein, 24 aa, Artificial
  peptide construct
  MISC_FEATURE (1)..(1): X is I, L or V
  MOD_RES (1)..(1): ACETYLATION
  MOD_RES (1)..(1): 4Abu
  MISC_FEATURE (2)..(2): X is I, L or V
  MISC_FEATURE (3)..(3): X is A or G
  MISC_FEATURE (4)..(4): X is A or G
  MISC_FEATURE (5)..(5): X is A or G
  MISC_FEATURE (6)..(6): X is C or S
  MISC_FEATURE (7)..(7): X is A or G
  MISC_FEATURE (8)..(8): X is I, L or V
  MOD_RES (8)..(8): 4Abu
  MISC_FEATURE (9)..(9): X is I, L or V
  MISC_FEATURE (10)..(10): X is K, R or H for basic amino acids
  MISC_FEATURE (11)..(11): X is  C or S
  MISC_FEATURE (12)..(12): X is I, L or V
  MISC_FEATURE (13)..(13): X is F or P
  MISC_FEATURE (14)..(14): X is A or G
  MISC_FEATURE (15)..(15): X is I, L or V
  MOD_RES (15)..(15): 4Abu
  MISC_FEATURE (16)..(16): X is D and E for acidic amino acids
  MISC_FEATURE (17)..(17): X is C or S
  MISC_FEATURE (18)..(18): X is I, L or V
  MISC_FEATURE (19)..(19): X is T or S
  MISC_FEATURE (20)..(20): X is F or P
  MISC_FEATURE (21)..(21): X is A or G
  MISC_FEATURE (22)..(22): X is N or Q for amidated amino acids
  MISC_FEATURE (23)..(23): X is D and E for acidic amino acids
  MOD_RES (23)..(23): 4Abu
  MISC_FEATURE (24)..(24): X is D and E for acidic amino acids
XXXXXXXXXXXXXXXXXXXXXXXX

SEQ ID NO: 90 - protein, 28 aa, Homo sapiens
EACVTSWLWSGEGAVFYRVDLHFINLGT

SEQ ID NO: 91 - protein, 28 aa, Artificial
  peptide construct
  MISC_FEATURE (1)..(1): X is D and E for acidic amino acids
  MOD_RES (1)..(1): ACETYLATION
  MISC_FEATURE (2)..(2): X is A or G
  MISC_FEATURE (3)..(3): X is C or S
  MISC_FEATURE (4)..(4): X is I, L or V
  MISC_FEATURE (5)..(5): X is T or S
  MISC_FEATURE (6)..(6): X is C or S
  MISC_FEATURE (7)..(7): X is F, W or Y for aromatic amino acids
  MISC_FEATURE (8)..(8): X is I, L or V
  MISC_FEATURE (9)..(9): X is F, W or Y for aromatic amino acids
  MISC_FEATURE (10)..(10): X is C or S
  MISC_FEATURE (11)..(11): X is A or G
  MISC_FEATURE (12)..(12): X is D and E for acidic amino acids
  MISC_FEATURE (13)..(13): X is A or G
  MISC_FEATURE (14)..(14): X is A or G
  MISC_FEATURE (15)..(15): X is I,  L or V
  MISC_FEATURE (16)..(16): X is F, W or Y for aromatic amino acids
  MISC_FEATURE (17)..(17): X is F, W or Y for aromatic amino acids
  MISC_FEATURE (18)..(18): X is K, R or H for basic amino acids
  MISC_FEATURE (19)..(19): X is I, L or V
  MOD_RES (19)..(19): 4Abu
  MOD_RES (19)..(19): GAMMA-CARBOXYGLUTAMIC ACID HYDROXYLATION
  MISC_FEATURE (20)..(20): X is D and E for acidic amino acids
  MISC_FEATURE (21)..(21): X is I, L or V
  MISC_FEATURE (22)..(22): X is K, R or H for basic amino acids
  MISC_FEATURE (23)..(23): X is F, W or Y for aromatic amino acids
  MISC_FEATURE (24)..(24): X is I, L or V
  MISC_FEATURE (25)..(25): X is N or Q for amidated amino acids
  MISC_FEATURE (26)..(26): X is I, L or V
  MISC_FEATURE (27)..(27): X is  A or G
  MISC_FEATURE (28)..(28): X is T or S
XXXXXXXXXXXXXXXXXXXXXXXXXXXX

SEQ ID NO: 92 - protein, 21 aa, Homo sapiens
MDFWCVEHDRPPPATPTSLTT

SEQ ID NO: 93 - protein, 21 aa, Artificial
  peptide construct
  MISC_FEATURE (1)..(1): X is M or Nle
  MOD_RES (1)..(1): ACETYLATION
  MISC_FEATURE (2)..(2): X is D and E for acidic amino acids
  MISC_FEATURE (3)..(3): X is F, W or Y for aromatic amino acids
  MISC_FEATURE (4)..(4): X is F, W or Y for aromatic amino acids
  MISC_FEATURE (5)..(5): X is C or S
  MISC_FEATURE (6)..(6): X is I, L or V
  MOD_RES (6)..(6): 4Abu
  MISC_FEATURE (7)..(7): X is D and E for acidic amino acids
  MISC_FEATURE (8)..(8): X is K, R or H for basic amino acids
  MISC_FEATURE (9)..(9): X is D and E for acidic amino acids
  MISC_FEATURE (10)..(10): X is K, R or H for basic amino acids
  MISC_FEATURE (11)..(11): X is F or P
  MISC_FEATURE (12)..(12): X is F or P
  MISC_FEATURE (13)..(13): X is F or P
  MISC_FEATURE (14)..(14): X is A or G
  MISC_FEATURE (15)..(15): X is T or S
  MISC_FEATURE (16)..(16): X is F or P
  MISC_FEATURE (17)..(17): X is T or S
  MISC_FEATURE (18)..(18): X is  C or S
  MISC_FEATURE (19)..(19): X is I, L or V
  MISC_FEATURE (20)..(20): X is T or S
  MISC_FEATURE (21)..(21): X is T or S
XXXXXXXXXXXXXXXXXXXXX

SEQ ID NO: 94 - protein, 20 aa, Artificial
  Completely synthesized peptide construct
NMYAMMIARFKMFPEVKEKG

SEQ ID NO: 95 - protein, 20 aa, Artificial
  peptide construct
  MISC_FEATURE (1)..(1): X is N or Q for amidated amino acids
  MOD_RES (1)..(1): ACETYLATION
  MISC_FEATURE (2)..(2): X is M or Nle
  MISC_FEATURE (3)..(3): X is F, W or Y for aromatic amino acids
  MISC_FEATURE (4)..(4): X is A or G
  MISC_FEATURE (5)..(5): X is M or Nle
  MISC_FEATURE (6)..(6): X is M or Nle
  MISC_FEATURE (7)..(7): X is I, L or V
  MISC_FEATURE (8)..(8): X is A or G
  MISC_FEATURE (9)..(9): X is K, R or H for basic amino acids
  MISC_FEATURE (10)..(10): X is F, W or Y for aromatic amino acids
  MISC_FEATURE (11)..(11): X is K, R or H for basic amino acids
  MISC_FEATURE (12)..(12): X is M or Nle
  MISC_FEATURE (13)..(13): X is F, W or Y for aromatic amino acids
  MISC_FEATURE (14)..(14): X is F or P
  MISC_FEATURE (15)..(15): X is D and E for acidic amino acids
  MOD_RES (15)..(15): 4Abu
  MISC_FEATURE (16)..(16): X is I, L or V
  MISC_FEATURE (17)..(17): X is K, R or H for basic amino acids
  MISC_FEATURE (18)..(18): X is D and E for acidic amino acids
  MISC_FEATURE (19)..(19): X is K, R or H for basic amino acids
  MISC_FEATURE (20)..(20): X is  A or G
XXXXXXXXXXXXXXXXXXXX

SEQ ID NO: 96 - protein, 33 aa, Artificial
  Completely synthesized peptide construct
NMYAMMIARFKMFPEVKEKGMAALPRLIAFTSE

SEQ ID NO: 97 - protein, 33 aa, Artificial
  peptide construct
  MISC_FEATURE (1)..(1): X is N or Q for amidated amino acids
  MOD_RES (1)..(1): ACETYLATION
  MISC_FEATURE (1)..(1): X is N or Q for amidated amino acids
  MISC_FEATURE (2)..(2): X is M or Nle
  MISC_FEATURE (3)..(3): X is F, W or Y for aromatic amino acids
  MISC_FEATURE (4)..(4): X is A or G
  MISC_FEATURE (5)..(5): X is M or Nle
  MISC_FEATURE (6)..(6): X is M or Nle
  MISC_FEATURE (7)..(7): X is I, L or V
  MISC_FEATURE (8)..(8): X is A or G
  MISC_FEATURE (9)..(9): X is K, R or H for basic amino acids
  MISC_FEATURE (10)..(10): X is F, W or Y for aromatic amino acids
  MISC_FEATURE (11)..(11): X is K, R or H for basic amino acids
  MISC_FEATURE (12)..(12): X is M or Nle
  MISC_FEATURE (13)..(13): X is F, W or Y for aromatic amino acids
  MISC_FEATURE (14)..(14): X is F or P
  MISC_FEATURE (15)..(15): X is D and E for acidic amino acids
  MOD_RES (15)..(15): 4Abu
  MISC_FEATURE (16)..(16): X is I, L or V
  MISC_FEATURE (17)..(17): X is K, R or H for basic amino acids
  MISC_FEATURE (18)..(18): X is D and E for acidic amino acids
  MISC_FEATURE (19)..(19): X is K, R or H for basic amino acids
  MISC_FEATURE (20)..(20): X is A or G
  MISC_FEATURE (21)..(21): X is M or Nle
  MISC_FEATURE (22)..(22): X is A or G
  MISC_FEATURE (23)..(23): X is A or G
  MISC_FEATURE (24)..(24): X is I, L or V
  MISC_FEATURE (25)..(25): X is F or P
  MISC_FEATURE (26)..(26): X is K, R or H for basic amino acids
  MISC_FEATURE (27)..(27): X is I, L or V
  MOD_RES (27)..(27): 4Abu
  MISC_FEATURE (28)..(28): X is I, L or V
  MISC_FEATURE (29)..(29): X is A or G
  MISC_FEATURE (30)..(30): X is F, W or Y or aromatic amino acids
  MISC_FEATURE (31)..(31): X is T or S
  MISC_FEATURE (32)..(32): X is C or S
  MISC_FEATURE (33)..(33): X is D and E for acidic amino acids
XXXXXXXXXXXXXXXXXXXXXXXXXXXXXXXXX

SEQ ID NO: 98 - protein, 13 aa, Homo sapiens
IAFTSEHSHFSLK

SEQ ID NO: 99 - protein, 13 aa, Artificial
  peptide construct
  MISC_FEATURE (1)..(1): X is I, L or V
  MOD_RES (1)..(1): ACETYLATION
  MISC_FEATURE (2)..(2): X is A or G
  MISC_FEATURE (3)..(3): X is F, W or Y for aromatic amino acids
  MISC_FEATURE (4)..(4): X is T or S
  MISC_FEATURE (5)..(5): X is C or S
  MISC_FEATURE (6)..(6): X is D and  E for acidic amino acids
  MISC_FEATURE (7)..(7): X is K, R or H for basic amino acids
  MISC_FEATURE (8)..(8): X is C or S
  MISC_FEATURE (9)..(9): X is K, R or H for basic amino acids
  MISC_FEATURE (10)..(10): X is F, W or Y for aromatic amino acids
  MISC_FEATURE (11)..(11): X is C or S
  MISC_FEATURE (12)..(12): X is I, L or V
  MISC_FEATURE (13)..(13): X is K,  R or H for basic amino acids
XXXXXXXXXXXXX

SEQ ID NO: 100 - protein, 21 aa, Artificial
  peptide construct
  MISC_FEATURE (1)..(1): X is M or Nle
  MOD_RES (1)..(1): ACETYLATION
  MISC_FEATURE (2)..(2): X is D and E for acidic amino acids
  MISC_FEATURE (3)..(3): X is F, W or Y for aromatic amino acids
  MISC_FEATURE (4)..(4): X is F, W or Y for aromatic amino acids
  MISC_FEATURE (5)..(5): X is C or S
  MISC_FEATURE (6)..(6): X is I, L or V
  MOD_RES (6)..(6): 4Abu
  MISC_FEATURE (7)..(7): X is D and E for acidic amino acids
  MISC_FEATURE (8)..(8): X is K, R or H for basic amino acids
  MISC_FEATURE (9)..(9): X is D and E for acidic amino acids
  MISC_FEATURE (10)..(10): X is K, R or H for basic amino acids
  MISC_FEATURE (11)..(11): X is F or P
  MISC_FEATURE (12)..(12): X is F or P
  MISC_FEATURE (13)..(13): X is F or P
  MISC_FEATURE (14)..(14): X is A or G
  MISC_FEATURE (15)..(15): X is Tor S
  MISC_FEATURE (16)..(16): X is F or P
  MISC_FEATURE (17)..(17): X is T or S
  MISC_FEATURE (18)..(18): X is C or S
  MISC_FEATURE (19)..(19): X is I, L or V
  MISC_FEATURE (20)..(20): X is T or S
  MISC_FEATURE (21)..(21): X is T or S
XXXXXXXXXXXXXXXXXXXXX

SEQ ID NO: 101 - protein, 10 aa, Artificial
  Completely synthesized peptide construct
ERPTLAFLQD

SEQ ID NO: 102 - protein, 10 aa, Artificial
  peptide construct
  MISC_FEATURE (1)..(1): X is D and E for acidic amino acids
  MOD_RES (1)..(1): ACETYLATION
  MISC_FEATURE (2)..(2): X is K, R or H for basic amino acids
  MISC_FEATURE (3)..(3): X is F or P
  MISC_FEATURE (4)..(4): X is T or S
  MISC_FEATURE (5)..(5): X is I, L or V
  MISC_FEATURE (6)..(6): X is A or G
  MISC_FEATURE (7)..(7): X is F, W or Y for aromatic amino acids
  MISC_FEATURE (8)..(8): X is I,  L or V
  MISC_FEATURE (9)..(9): X is N or Q for amidated amino acids
  MISC_FEATURE (10)..(10): X is D and E for acidic amino acids
XXXXXXXXXX

SEQ ID NO: 103 - protein, 10 aa, Homo sapiens
DRSTKVIDFH

SEQ ID NO: 104 - protein, 10 aa, Artificial
  peptide construct
  MISC_FEATURE (1)..(1): X is D and E for acidic amino acids
  MOD_RES (1)..(1): ACETYLATION
  MISC_FEATURE (2)..(2): X is K, R or H for basic amino acids
  MISC_FEATURE (3)..(3): X is C  or S
  MISC_FEATURE (4)..(4): X is T or S
  MISC_FEATURE (5)..(5): X is K, R or H for basic amino acids
  MISC_FEATURE (6)..(6): X is I, L or V
  MOD_RES (6)..(6): 4Abu
  MOD_RES (6)..(6): GAMMA-CARBOXYGLUTAMIC ACID HYDROXYLATION
  MISC_FEATURE (7)..(7): X is I, L or V
  MISC_FEATURE (8)..(8): X is  D and E for acidic amino acids
  MISC_FEATURE (9)..(9): X is F, W or Y for aromatic amino acids
  MISC_FEATURE (10)..(10): X is K, R or H for basic amino acids
XXXXXXXXXX

SEQ ID NO: 105 - protein, 13 aa, Artificial
  peptide construct
  MISC_FEATURE (1)..(1): X is I, L or V
  MOD_RES (1)..(1): ACETYLATION
  MISC_FEATURE (2)..(2): X is A or G
  MISC_FEATURE (3)..(3): X is A or G
  MISC_FEATURE (4)..(4): X is F,  W or Y for aromatic amino acids
  MISC_FEATURE (5)..(5): X is K, R or H for basic amino acids
  MISC_FEATURE (6)..(6): X is A or G
  MISC_FEATURE (7)..(7): X is D and E for acidic amino acids
  MISC_FEATURE (8)..(8): X is N or Q for amidated amino acids
  MISC_FEATURE (9)..(9): X is A or G
  MISC_FEATURE (10)..(10): X is F or P
  MISC_FEATURE (11)..(11): X is K, R or H for basic amino acids
  MISC_FEATURE (12)..(12): X is A or G
  MISC_FEATURE (13)..(13): X is D and E for acidic amino acids
XXXXXXXXXXXXX

SEQ ID NO: 106 - protein, 8 aa, Artificial
  peptide construct
  MISC_FEATURE (1)..(1): X is K, R or H for basic amino acids
  MOD_RES (1)..(1): ACETYLATION
  MISC_FEATURE (2)..(2): X is N or Q for amidated amino acids
  MISC_FEATURE (3)..(3): X is I, L or V
  MOD_RES (3)..(3): 4Abu
  MISC_FEATURE (4)..(4): X is I, L or V
  MISC_FEATURE (5)..(5): X is T or S
  MISC_FEATURE (6)..(6): X is  F or P
  MISC_FEATURE (7)..(7): X is K, R or H for basic amino acids
  MISC_FEATURE (8)..(8): X is T or S
XXXXXXXX

SEQ ID NO: 107 - protein, 15 aa, Artificial
  peptide construct
  MISC_FEATURE (1)..(1): X is A or G
  MOD_RES (1)..(1): ACETYLATION
  MISC_FEATURE (2)..(2): X is D and E for acidic amino acids
  MISC_FEATURE (3)..(3): X is K, R or H for basic amino acids
  MISC_FEATURE (4)..(4): X is I, L or V
  MISC_FEATURE (5)..(5): X is C or S
  MISC_FEATURE (6)..(6): X is F, W or Y for aromatic amino acids
  MISC_FEATURE (7)..(7): X is F, W or Y for aromatic amino acids
  MISC_FEATURE (8)..(8): X is C or S
  MISC_FEATURE (9)..(9): X is K, R or H for basic amino acids
  MISC_FEATURE (10)..(10): X is N or Q for amidated amino acids
  MISC_FEATURE (11)..(11): X is K, R or H for basic amino acids
  MISC_FEATURE (12)..(12): X is D and E for acidic amino acids
  MISC_FEATURE (13)..(13): X is K, R or H for basic amino acids
  MISC_FEATURE (14)..(14): X is K, R or H for basic amino acids
  MISC_FEATURE (15)..(15): X is C or S
XXXXXXXXXXXXXXX

SEQ ID NO: 108 - protein, 17 aa, Artificial
  peptide construct
  MISC_FEATURE (1)..(1): X is D and E for acidic amino acids
  MOD_RES (1)..(1): ACETYLATION
  MOD_RES (1)..(1): 4Abu
  MOD_RES (1)..(1): 4Abu
  MOD_RES (1)..(1): GAMMA-CARBOXYGLUTAMIC ACID HYDROXYLATION
  MISC_FEATURE (2)..(2): X is I, L or V
  MISC_FEATURE (3)..(3): X is I, L or V
  MISC_FEATURE (4)..(4): X is I, L or V
  MISC_FEATURE (5)..(5): X is T or S
  MISC_FEATURE (6)..(6): X is K, R or H for basic amino acids
  MISC_FEATURE (7)..(7): X is F, W or Y for aromatic amino acids
  MISC_FEATURE (8)..(8): X is F or P
  MISC_FEATURE (9)..(9): X is F, W or Y for aromatic amino acids
  MISC_FEATURE (10)..(10): X is D and E for acidic amino acids
  MOD_RES (10)..(10): 4Abu
  MOD_RES (10)..(10): 4Abu
  MISC_FEATURE (11)..(11): X is D and E for acidic amino acids
  MISC_FEATURE (12)..(12): X is N or Q for amidated amino acids
  MISC_FEATURE (13)..(13): X is N or Q for amidated amino acids
  MISC_FEATURE (14)..(14): X is C or S
  MISC_FEATURE (15)..(15): X is C or S
  MISC_FEATURE (16)..(16): X is M or Nle
  MISC_FEATURE (17)..(17): X is K, R or H for basic amino acids
XXXXXXXXXXXXXXXXX

SEQ ID NO: 109 - protein, 13 aa, Artificial
  peptide construct
  MISC_FEATURE (1)..(1): X is I, L or V
  MOD_RES (1)..(1): ACETYLATION
  MISC_FEATURE (2)..(2): X is K, R or H for basic amino acids
  MISC_FEATURE (3)..(3): X is F, W or Y for aromatic amino acids
  MISC_FEATURE (4)..(4): X is F, W or Y for aromatic amino acids
  MISC_FEATURE (5)..(5): X is K, R or H for basic amino acids
  MISC_FEATURE (6)..(6): X is N or Q for amidated amino acids
  MISC_FEATURE (7)..(7): X is I, L or V
  MOD_RES (7)..(7): 4Abu
  MISC_FEATURE (8)..(8): X is I, L or V
  MISC_FEATURE (9)..(9): X is T or S
  MISC_FEATURE (10)..(10): X is F or P
  MISC_FEATURE (11)..(11): X is K, R or H for basic amino acids
  MISC_FEATURE (12)..(12): X is Tor S
  MISC_FEATURE (13)..(13): X is F or P
XXXXXXXXXXXXX

SEQ ID NO: 110 - protein, 17 aa, Artificial
  peptide construct
  MISC_FEATURE (1)..(1): X is F, W or Y for aromatic amino acids
  MOD_RES (1)..(1): ACETYLATION
  MISC_FEATURE (2)..(2): X is N or Q for amidated amino acids
  MISC_FEATURE (3)..(3): X is N or Q for amidated amino acids
  MISC_FEATURE (4)..(4): X is I, L or V
  MISC_FEATURE (5)..(5): X is N or Q for amidated amino acids
  MISC_FEATURE (6)..(6): X is C or S
  MISC_FEATURE (7)..(7): X is D and E for acidic amino acids
  MISC_FEATURE (8)..(8): X is K, R or H for basic amino acids
  MISC_FEATURE (9)..(9): X is  A or G
  MISC_FEATURE (10)..(10): X is I,  L or V
  MISC_FEATURE (11)..(11): X is F or P
  MISC_FEATURE (12)..(12): X is N or Q for amidated amino acids
  MISC_FEATURE (13)..(13): X is D and E for acidic amino acids
  MISC_FEATURE (14)..(14): X is N or Q for amidated amino acids
  MISC_FEATURE (15)..(15): X is I, L or V
  MOD_RES (15)..(15): 4Abu
  MISC_FEATURE (16)..(16): X is D and E for acidic amino acids
  MISC_FEATURE (17)..(17): X is N or Q for amidated amino acids
XXXXXXXXXXXXXXXXX

SEQ ID NO: 111 - protein, 13 aa, Artificial
  peptide construct
  MISC_FEATURE (1)..(1): X is I, L or V
  MOD_RES (1)..(1): ACETYLATION
  MISC_FEATURE (2)..(2): X is F, W or Y for aromatic amino acids
  MISC_FEATURE (3)..(3): X is I, L or V
  MISC_FEATURE (4)..(4): X is K, R or H for basic amino acids
  MISC_FEATURE (5)..(5): X is K, R or H for basic amino acids
  MISC_FEATURE (6)..(6): X is I, L or V
  MISC_FEATURE (7)..(7): X is C or S
  MISC_FEATURE (8)..(8): X is N or Q for amidated amino acids
  MISC_FEATURE (9)..(9): X is I, L or V
  MOD_RES (9)..(9): 4Abu
  MOD_RES (9)..(9): GAMMA-CARBOXYGLUTAMIC ACID HYDROXYLATION
  MISC_FEATURE (10)..(10): X is I, L or V
  MISC_FEATURE (11)..(11): X is I, L or V
  MISC_FEATURE (12)..(12): X is K, R or H for basic amino acids
  MISC_FEATURE (13)..(13): X is  A or G
XXXXXXXXXXXXX

SEQ ID NO: 112 - protein, 15 aa, Artificial
  peptide construct
  MISC_FEATURE (1)..(1): X is M or Nle
  MOD_RES (1)..(1): ACETYLATION
  MISC_FEATURE (2)..(2): X is K, R or H for basic amino acids
  MISC_FEATURE (3)..(3): X is I, L or V
  MISC_FEATURE (4)..(4): X is T or S
  MISC_FEATURE (5)..(5): X is I, L or V
  MISC_FEATURE (6)..(6): X is A or G
  MISC_FEATURE (7)..(7): X is F, W or Y for aromatic amino acids
  MISC_FEATURE (8)..(8): X is N or Q for amidated amino acids
  MISC_FEATURE (9)..(9): X is N or Q for amidated amino acids
  MISC_FEATURE (10)..(10): X is F, W or Y for aromatic amino acids
  MISC_FEATURE (11)..(11): X is A or G
  MISC_FEATURE (12)..(12): X is F or P
  MISC_FEATURE (13)..(13): X is N or Q for amidated amino acids
  MISC_FEATURE (14)..(14): X is K, R or H for basic amino acids
  MISC_FEATURE (15)..(15): X is K, R or H for basic amino acids
XXXXXXXXXXXXXXX

SEQ ID NO: 113 - protein, 15 aa, Artificial
  peptide construct
  MISC_FEATURE (1)..(1): X is I, L or V
  MOD_RES (1)..(1): ACETYLATION
  MISC_FEATURE (2)..(2): X is A or G
  MISC_FEATURE (3)..(3): X is C or S
  MISC_FEATURE (4)..(4): X is K, R or H for basic amino acids
  MISC_FEATURE (5)..(5): X is K, R or H for basic amino acids
  MISC_FEATURE (6)..(6): X is I, L or V
  MOD_RES (6)..(6): 4Abu
  MISC_FEATURE (7)..(7): X is D and E for acidic amino acids
  MISC_FEATURE (8)..(8): X is A or G
  MISC_FEATURE (9)..(9): X is I, L or V
  MOD_RES (9)..(9): 4Abu
  MISC_FEATURE (10)..(10): X is I, L or V
  MISC_FEATURE (11)..(11): X is A or G
  MISC_FEATURE (12)..(12): X is A or G
  MISC_FEATURE (13)..(13): X is F, W or Y for aromatic amino acids
  MISC_FEATURE (14)..(14): X is N or Q for amidated amino acids
  MISC_FEATURE (15)..(15): X is N or Q for amidated amino acids
XXXXXXXXXXXXXXX

SEQ ID NO: 114 - protein, 19 aa, Artificial
  peptide construct
  MISC_FEATURE (1)..(1): X is I, L or V
  MOD_RES (1)..(1): 4Abu
  MOD_RES (1)..(1): GAMMA-CARBOXYGLUTAMIC ACID HYDROXYLATION
  MOD_RES (1)..(1): ACETYLATION
  MISC_FEATURE (2)..(2): X is D and E for acidic amino acids
  MISC_FEATURE (3)..(3): X is I, L or V
  MISC_FEATURE (4)..(4): X is F, W or Y for aromatic amino acids
  MISC_FEATURE (5)..(5): X is A or G
  MISC_FEATURE (6)..(6): X is C or S
  MISC_FEATURE (7)..(7): X is K, R or H for basic amino acids
  MISC_FEATURE (8)..(8): X is N or Q for amidated amino acids
  MISC_FEATURE (9)..(9): X is F, W or Y for aromatic amino acids
  MISC_FEATURE (10)..(10): X is K, R or H or basic amino acids
  MISC_FEATURE (11)..(11): X is I, L or V
  MISC_FEATURE (12)..(12): X is N or Q for amidated amino acids
  MISC_FEATURE (13)..(13): X is K, R or H for basic amino acids
  MISC_FEATURE (14)..(14): X is N or Q for amidated amino acids
  MISC_FEATURE (15)..(15): X is T or S
  MISC_FEATURE (16)..(16): X is I, L  or V
  MISC_FEATURE (17)..(17): X is A or G
  MISC_FEATURE (18)..(18): X is T or S
  MISC_FEATURE (19)..(19): X is A or G
XXXXXXXXXXXXXXXXXXX

SEQ ID NO: 115 - protein, 25 aa, Artificial
  peptide construct
  MISC_FEATURE (1)..(1): X is A or G
  MOD_RES (1)..(1): ACETYLATION
  MISC_FEATURE (2)..(2): X is I, L or V
  MISC_FEATURE (3)..(3): X is A or G
  MISC_FEATURE (4)..(4): X is A or G
  MISC_FEATURE (5)..(5): X is I, L or V
  MOD_RES (5)..(5): 4Abu
  MISC_FEATURE (6)..(6): X is I, L or V
  MISC_FEATURE (7)..(7): X is K, R or H for basic amino acids
  MISC_FEATURE (8)..(8): X is I, L or V
  MOD_RES (8)..(8): 4Abu
  MISC_FEATURE (9)..(9): X is I, L or V
  MISC_FEATURE (10)..(10): X is T or S
  MISC_FEATURE (11)..(11): X is T or S
  MISC_FEATURE (12)..(12): X is A or G
  MISC_FEATURE (13)..(13): X is F or P
  MISC_FEATURE (14)..(14): X is A or G
  MISC_FEATURE (15)..(15): X is I, L or V
  MOD_RES (15)..(15): 4Abu
  MISC_FEATURE (16)..(16): X is I, L or V
  MISC_FEATURE (17)..(17): X is C or S
  MISC_FEATURE (18)..(18): X is F, W or Y for basic amino acids
  MISC_FEATURE (19)..(19): X is I, L or V
  MISC_FEATURE (20)..(20): X is K, R or H for basic amino acids
  MISC_FEATURE (21)..(21): X is K, R or H for basic amino acids
  MISC_FEATURE (22)..(22): X is K, R or H for basic amino acids
  MISC_FEATURE (23)..(23): X is K, R or H for basic amino acids
  MISC_FEATURE (24)..(24): X is N or Q for amidated amino acids
  MISC_FEATURE (25)..(25): X is N or Q for amidated amino acids
XXXXXXXXXXXXXXXXXXXXXXXXX

SEQ ID NO: 116 - protein, 18 aa, Artificial
  peptide construct
  MISC_FEATURE (1)..(1): X is N or Q for amidated amino acids
  MOD_RES (1)..(1): ACETYLATION
  MISC_FEATURE (2)..(2): X is A or G
  MISC_FEATURE (3)..(3): X is N or Q for amidated amino acids
  MISC_FEATURE (4)..(4): X is D and E for acidic amino acids
  MOD_RES (4)..(4): 4Abu
  MISC_FEATURE (5)..(5): X is D and E for acidic amino acids
  MISC_FEATURE (6)..(6): X is K, R or H for basic amino acids
  MISC_FEATURE (7)..(7): X is A or G
  MISC_FEATURE (8)..(8): X is A or G
  MISC_FEATURE (9)..(9): X is I, L or V
  MOD_RES (9)..(9): 4Abu
  MISC_FEATURE (10)..(10): X is I, L or V
  MISC_FEATURE (11)..(11): X is  C or S
  MISC_FEATURE (12)..(12): X is T or S
  MISC_FEATURE (13)..(13): X is A or G
  MISC_FEATURE (14)..(14): X is I, L or V
  MOD_RES (14)..(14): 4Abu
  MISC_FEATURE (15)..(15): X is I, L or V
  MISC_FEATURE (16)..(16): X is A or G
  MISC_FEATURE (17)..(17): X is A or G
  MISC_FEATURE (18)..(18): X is A or G
XXXXXXXXXXXXXXXXXX

SEQ ID NO: 117 - protein, 18 aa, Artificial
  peptide construct
  MISC_FEATURE (1)..(1): X is D and E for acidic amino acids
  MOD_RES (1)..(1): ACETYLATION
  MISC_FEATURE (2)..(2): X is A or G
  MISC_FEATURE (3)..(3): X is N or Q for amidated amino acids
  MISC_FEATURE (4)..(4): X is D and E for acidic amino acids
  MOD_RES (4)..(4): 4Abu
  MISC_FEATURE (5)..(5): X is D and E for acidic amino acids
  MISC_FEATURE (6)..(6): X is K, R or H for basic amino acids
  MISC_FEATURE (7)..(7): X is A or G
  MISC_FEATURE (8)..(8): X is A or G
  MISC_FEATURE (9)..(9): X is I, L or V
  MOD_RES (9)..(9): 4Abu
  MISC_FEATURE (10)..(10): X is I, L or V
  MISC_FEATURE (11)..(11): X is C or S
  MISC_FEATURE (12)..(12): X is T or S
  MISC_FEATURE (13)..(13): X is A or G
  MISC_FEATURE (14)..(14): X is I, L or V
  MOD_RES (14)..(14): 4Abu
  MISC_FEATURE (15)..(15): X is I, L or V
  MISC_FEATURE (16)..(16): X is A or G
  MISC_FEATURE (17)..(17): X is A or G
  MISC_FEATURE (18)..(18): X is A or G
XXXXXXXXXXXXXXXXXX

SEQ ID NO: 118 - protein, 17 aa, Artificial
  peptide construct
  MISC_FEATURE (1)..(1): X is I, L or V
  MOD_RES (1)..(1): ACETYLATION
  MOD_RES (1)..(1): 4Abu
  MISC_FEATURE (2)..(2): X is I, L or V
  MISC_FEATURE (3)..(3): X is F, W or Y for aromatic amino acids
  MISC_FEATURE (4)..(4): X is K, R or H for basic amino acids
  MISC_FEATURE (5)..(5): X is K, R or H for basic amino acids
  MISC_FEATURE (6)..(6): X is N or Q for amidated amino acids
  MISC_FEATURE (7)..(7): X is K, R or H for basic amino acids
  MISC_FEATURE (8)..(8): X is D and E for acidic amino acids
  MISC_FEATURE (9)..(9): X is K,  R or H for basic amino acids
  MISC_FEATURE (10)..(10): X is I, L or V
  MISC_FEATURE (11)..(11): X is A or G
  MISC_FEATURE (12)..(12): X is D and E for acidic amino acids
  MOD_RES (12)..(12): GAMMA-CARBOXYGLUTAMIC ACID HYDROXYLATION
  MISC_FEATURE (13)..(13): X is I, L or V
  MISC_FEATURE (14)..(14): X is D and E for acidic amino acids
  MISC_FEATURE (15)..(15): X is N or Q for amidated amino acids
  MISC_FEATURE (16)..(16): X is C or S
  MISC_FEATURE (17)..(17): X is D and E for acidic amino acids
XXXXXXXXXXXXXXXXX

SEQ ID NO: 119 - protein, 13 aa, Artificial
  peptide construct
  MISC_FEATURE (1)..(1): X is D and E for acidic amino acids
  MOD_RES (1)..(1): ACETYLATION
  MOD_RES (1)..(1): 4Abu
  MOD_RES (1)..(1): GAMMA-CARBOXYGLUTAMIC ACID HYDROXYLATION
  MISC_FEATURE (2)..(2): X is I, L or V
  MISC_FEATURE (3)..(3): X is I, L or V
  MISC_FEATURE (4)..(4): X is K, R or H for basic amino acids
  MISC_FEATURE (5)..(5): X is N or Q for amidated amino acids
  MISC_FEATURE (6)..(6): X is A or G
  MISC_FEATURE (7)..(7): X is D and E for acidic amino acids
  MISC_FEATURE (8)..(8): X is K, R or H for basic amino acids
  MISC_FEATURE (9)..(9): X is I, L or V
  MOD_RES (9)..(9): 4Abu
  MISC_FEATURE (10)..(10): X is D and E for acidic amino acids
  MISC_FEATURE (11)..(11): X is K, R or H for basic amino acids
  MISC_FEATURE (12)..(12): X is I, L or V
  MOD_RES (12)..(12): 4Abu
  MISC_FEATURE (13)..(13): X is D and E for acidic amino acids
XXXXXXXXXXXXX

SEQ ID NO: 120 - protein, 11 aa, Artificial
  peptide construct
  MISC_FEATURE (1)..(1): X is F or P
  MOD_RES (1)..(1): ACETYLATION
  MISC_FEATURE (2)..(2): X is C or S
  MISC_FEATURE (3)..(3): X is T or S
  MISC_FEATURE (4)..(4): X is K, R or H for basic amino acids
  MISC_FEATURE (5)..(5): X is I, L or V
  MOD_RES (5)..(5): 4Abu
  MOD_RES (5)..(5): GAMMA-CARBOXYGLUTAMIC ACID HYDROXYLATION
  MISC_FEATURE (6)..(6): X is I, L or V
  MISC_FEATURE (7)..(7): X is I, L or V
  MISC_FEATURE (8)..(8): X is T or S
  MISC_FEATURE (9)..(9): X is K, R or H for basic amino acids
  MISC_FEATURE (10)..(10): X is T or S
  MISC_FEATURE (11)..(11): X is I, L or V
XXXXXXXXXXX

SEQ ID NO: 121 - protein, 15 aa, Artificial
  peptide construct
  MISC_FEATURE (1)..(1): X is D and E for acidic amino acids
  MOD_RES (1)..(1): ACETYLATION
  MISC_FEATURE (2)..(2): X is F, W or Y for aromatic amino acids
  MISC_FEATURE (3)..(3): X is I, L or V
  MISC_FEATURE (4)..(4): X is F or P
  MISC_FEATURE (5)..(5): X is K, R or H for basic amino acids
  MISC_FEATURE (6)..(6): X is F, W or Y for aromatic amino acids
  MISC_FEATURE (7)..(7): X is K, R or H for basic amino acids
  MISC_FEATURE (8)..(8): X is N or Q for amidated amino acids
  MISC_FEATURE (9)..(9): X is T or S
  MISC_FEATURE (10)..(10): X is  C or S
  MISC_FEATURE (11)..(11): X is I, L or V
  MISC_FEATURE (12)..(12): X is A  or G
  MISC_FEATURE (13)..(13): X is K, R or H for basic amino acids
  MISC_FEATURE (14)..(14): X is K, R or H for basic amino acids
  MISC_FEATURE (15)..(15): X is F or P
XXXXXXXXXXXXXXX

SEQ ID NO: 122 - protein, 9 aa, Artificial
  peptide construct
  MISC_FEATURE (1)..(1): X is A or G
  MOD_RES (1)..(1): ACETYLATION
  MISC_FEATURE (2)..(2): X is F, W or Y for aromatic amino acids
  MISC_FEATURE (3)..(3): X is M or Nle
  MISC_FEATURE (4)..(4): X is T or S
  MISC_FEATURE (5)..(5): X is M or Nle
  MISC_FEATURE (6)..(6): X is K, R or H for basic amino acids
  MISC_FEATURE (7)..(7): X is I, L or V
  MISC_FEATURE (8)..(8): X is K, R or H for basic amino acids
  MISC_FEATURE (9)..(9): X is N or Q for amidated amino acids
XXXXXXXXX

SEQ ID NO: 123 - protein, 31 aa, Artificial
  peptide construct
  MISC_FEATURE (1)..(1): X is D and E for acidic amino acids
  MOD_RES (1)..(1): ACETYLATION
  MISC_FEATURE (2)..(2): X is N or Q for amidated amino acids
  MISC_FEATURE (3)..(3): X is N or Q for amidated amino acids
  MISC_FEATURE (4)..(4): X is I, L or V
  MOD_RES (4)..(4): 4Abu
  MOD_RES (4)..(4): GAMMA-CARBOXYGLUTAMIC ACID HYDROXYLATION
  MISC_FEATURE (5)..(5): X is I, L or V
  MISC_FEATURE (6)..(6): X is D and E for acidic amino acids
  MISC_FEATURE (7)..(7): X is T or S
  MISC_FEATURE (8)..(8): X is C or S
  MISC_FEATURE (9)..(9): X is K, R or H for basic amino acids
  MISC_FEATURE (10)..(10): X is N or Q for amidated amino acids
  MISC_FEATURE (11)..(11): X is  D and E for acidic amino acids
  MISC_FEATURE (12)..(12): X is K, R or H for basic amino acids
  MISC_FEATURE (13)..(13): X is I, L or V
  MISC_FEATURE (14)..(14): X is K, R or H for basic amino acids
  MISC_FEATURE (15)..(15): X is N or Q for amidated amino acids
  MISC_FEATURE (16)..(16): X is K, R or H for basic amino acids
  MISC_FEATURE (17)..(17): X is K, R or H for basic amino acids
  MISC_FEATURE (18)..(18): X is  A or G
  MISC_FEATURE (19)..(19): X is N or Q for amidated amino acids
  MISC_FEATURE (20)..(20): X is A or G
  MISC_FEATURE (21)..(21): X is C or S
  MISC_FEATURE (22)..(22): X is C or S
  MISC_FEATURE (23)..(23): X is T or S
  MISC_FEATURE (24)..(24): X is K, R or H for basic amino acids
  MISC_FEATURE (25)..(25): X is F, W or Y for aromatic amino acids
  MISC_FEATURE (26)..(26): X is D and E for acidic amino acids
  MISC_FEATURE (27)..(27): X is A or G
  MISC_FEATURE (28)..(28): X is N or Q for amidated amino acids
  MISC_FEATURE (29)..(29): X is I,  L or V
  MISC_FEATURE (30)..(30): X is F or P
  MISC_FEATURE (31)..(31): X is C or S
XXXXXXXXXXXXXXXXXXXXXXXXXXXXXXX

SEQ ID NO: 124 - protein, 10 aa, Artificial
  peptide construct
  MISC_FEATURE (1)..(1): X is D and E for acidic amino acids
  MOD_RES (1)..(1): ACETYLATION
  MISC_FEATURE (2)..(2): X is N or Q for amidated amino acids
  MISC_FEATURE (3)..(3): X is T or S
  MISC_FEATURE (4)..(4): X is N or Q for amidated amino acids
  MISC_FEATURE (5)..(5): X is D and E for acidic amino acids
  MISC_FEATURE (6)..(6): X is T or S
  MISC_FEATURE (7)..(7): X is D and E for acidic amino acids
  MISC_FEATURE (8)..(8): X is A or G
  MISC_FEATURE (9)..(9): X is A or G
  MISC_FEATURE (10)..(10): X is C or S
XXXXXXXXXX

SEQ ID NO: 125 - protein, 9 aa, Artificial
  peptide construct
  MISC_FEATURE (1)..(1): X is I, L or V
  MOD_RES (1)..(1): ACETYLATION
  MISC_FEATURE (2)..(2): X is N or Q for amidated amino acids
  MISC_FEATURE (3)..(3): X is A or G
  MISC_FEATURE (4)..(4): X is D and E for acidic amino acids
  MOD_RES (4)..(4): 4Abu
  MISC_FEATURE (5)..(5): X is D and E for acidic amino acids
  MISC_FEATURE (6)..(6): X is C or S
  MISC_FEATURE (7)..(7): X is N or Q for amidated amino acids
  MISC_FEATURE (8)..(8): X is D and E for acidic amino acids
  MISC_FEATURE (9)..(9): X is K, R or H for basic amino acids
XXXXXXXXX

SEQ ID NO: 126 - protein, 16 aa, Artificial
  peptide construct
  MISC_FEATURE (1)..(1): X is D and E for acidic amino acids
  MOD_RES (1)..(1): ACETYLATION
  MOD_RES (1)..(1): 4Abu
  MOD_RES (1)..(1): GAMMA-CARBOXYGLUTAMIC ACID HYDROXYLATION
  MISC_FEATURE (2)..(2): X is I, L or V
  MISC_FEATURE (3)..(3): X is I, L or V
  MISC_FEATURE (4)..(4): X is K, R or H for basic amino acids
  MISC_FEATURE (5)..(5): X is N or Q for amidated amino acids
  MISC_FEATURE (6)..(6): X is A or G
  MISC_FEATURE (7)..(7): X is D and E for acidic amino acids
  MISC_FEATURE (8)..(8): X is K, R or H for basic amino acids
  MISC_FEATURE (9)..(9): X is I, L or V
  MOD_RES (9)..(9): 4Abu
  MISC_FEATURE (10)..(10): X is D and E for acidic amino acids
  MISC_FEATURE (11)..(11): X is K, R or H for basic amino acids
  MISC_FEATURE (12)..(12): X is I, L or V
  MOD_RES (12)..(12): 4Abu
  MISC_FEATURE (13)..(13): X is D and E for acidic amino acids
  MISC_FEATURE (14)..(14): X is A or G
  MISC_FEATURE (15)..(15): X is A or G
  MISC_FEATURE (16)..(16): X is A or G
XXXXXXXXXXXXXXXX

SEQ ID NO: 127 - protein, 4 aa, Artificial
  peptide construct
  MISC_FEATURE (1)..(1): X is A or G
  MOD_RES (1)..(1): ACETYLATION
  MISC_FEATURE (2)..(2): X is A or G
  MISC_FEATURE (3)..(3): X is A or G
  MISC_FEATURE (4)..(4): X is C or S
XXXX

SEQ ID NO: 128 - protein, 5 aa, Artificial
  peptide construct
  MISC_FEATURE (1)..(1): X is A or G
  MOD_RES (1)..(1): ACETYLATION
  MISC_FEATURE (2)..(2): X is A or G
  MISC_FEATURE (3)..(3): X is A or G
  MISC_FEATURE (4)..(4): X is C or S
  MISC_FEATURE (5)..(5): X is C or S
XXXXX

SEQ ID NO: 129 - protein, 5 aa, Artificial
  peptide construct
  MISC_FEATURE (1)..(1): X is A or G
  MOD_RES (1)..(1): ACETYLATION
  MISC_FEATURE (2)..(2): X is A or G
  MISC_FEATURE (3)..(3): X is A or G
  MISC_FEATURE (4)..(4): X is A or G
  MISC_FEATURE (5)..(5): X is C or S
XXXXX

SEQ ID NO: 130 - protein, 5 aa, Artificial
  peptide construct
  MISC_FEATURE (1)..(1): X is A or G
  MOD_RES (1)..(1): ACETYLATION
  MISC_FEATURE (2)..(2): X is A or G
  MISC_FEATURE (3)..(3): X is A or G
  MISC_FEATURE (4)..(4): X is A or G
  MISC_FEATURE (5)..(5): X is C or S
XXXXX

SEQ ID NO: 131 - protein, 8 aa, Artificial
  peptide construct
  MISC_FEATURE (1)..(1): X is A or G
  MOD_RES (1)..(1): ACETYLATION
  MISC_FEATURE (2)..(2): X is A or G
  MISC_FEATURE (3)..(3): X is A or G
  MISC_FEATURE (4)..(4): X is C or S
  MISC_FEATURE (5)..(5): X is A or G
  MISC_FEATURE (6)..(6): X is A or G
  MISC_FEATURE (7)..(7): X is A or G
  MISC_FEATURE (8)..(8): X is C or S
XXXXXXXX

SEQ ID NO: 132 - protein, 8 aa, Artificial
  peptide construct
  MISC_FEATURE (1)..(1): X is I, L or V
  MOD_RES (1)..(1): ACETYLATION
  MISC_FEATURE (2)..(2): X is K, R or H for basic amino acids
  MISC_FEATURE (3)..(3): X is A or G
  MISC_FEATURE (4)..(4): X is A or G
  MISC_FEATURE (5)..(5): X is A or G
  MISC_FEATURE (6)..(6): X is A or G
  MISC_FEATURE (7)..(7): X is C or S
  MISC_FEATURE (8)..(8): X is C or S
XXXXXXXX

SEQ ID NO: 133 - protein, 12 aa, Artificial
  peptide construct
  MISC_FEATURE (1)..(1): X is A or G
  MOD_RES (1)..(1): ACETYLATION
  MISC_FEATURE (2)..(2): X is A or G
  MISC_FEATURE (3)..(3): X is A or G
  MISC_FEATURE (4)..(4): X is C or S
  MISC_FEATURE (5)..(5): X is A or G
  MISC_FEATURE (6)..(6): X is T or S
  MISC_FEATURE (7)..(7): X is A or G
  MISC_FEATURE (8)..(8): X is C or S
  MISC_FEATURE (9)..(9): X is A or G
  MISC_FEATURE (10)..(10): X is C or S
  MISC_FEATURE (11)..(11): X is A or G
  MISC_FEATURE (12)..(12): X is C or S
XXXXXXXXXXXX

SEQ ID NO: 134 - protein, 58 aa, Artificial
  Completely synthesized peptide construct
DGQEEKAGVVSTGLIGGGDAEFRHDSGYEVHHQKLVFFAEDVGSNKGAIIGLMVGGVV

SEQ ID NO: 135 - protein, 58 aa, Artificial
  peptide construct
  MISC_FEATURE (1)..(1): X is D and E for acidic amino acids
  MISC_FEATURE (2)..(2): X is A or G
  MISC_FEATURE (3)..(3): X is N or Q for amidated amino acids
  MISC_FEATURE (4)..(4): X is D and E for acidic amino acids
  MISC_FEATURE (5)..(5): X is D and E for acidic amino acids
  MISC_FEATURE (6)..(6): X is K, R or H for basic amino acids
  MISC_FEATURE (7)..(7): X is A or G
  MISC_FEATURE (8)..(8): X is A or G
  MISC_FEATURE (9)..(9): X is I, L or V
  MISC_FEATURE (10)..(10): X is I, L or V
  MISC_FEATURE (11)..(11): X is C or S
  MISC_FEATURE (12)..(12): X is T or S
  MISC_FEATURE (13)..(13): X is A or G
  MISC_FEATURE (14)..(14): X is I, L or V
  MISC_FEATURE (15)..(15): X is I, L or V
  MISC_FEATURE (16)..(16): X is A or G
  MISC_FEATURE (17)..(17): X is A or G
  MISC_FEATURE (18)..(18): X is A or G
  MISC_FEATURE (19)..(19): X is D and E for acidic amino acids
  MISC_FEATURE (20)..(20): X is A or G
  MISC_FEATURE (21)..(21): X is D and E for acidic amino acids
  MISC_FEATURE (22)..(22): X is F, W or Y for aromatic amino acids
  MISC_FEATURE (23)..(23): X is K, R or H for basic amino acids
  MISC_FEATURE (24)..(24): X is K, R or H for basic amino acids
  MISC_FEATURE (25)..(25): X is D and E for acidic amino acids
  MISC_FEATURE (26)..(26): X is T or S
  MISC_FEATURE (27)..(27): X is A or G
  MISC_FEATURE (28)..(28): X is F, W or Y for aromatic amino acids
  MISC_FEATURE (29)..(29): X is D and E for acidic amino acids
  MISC_FEATURE (30)..(30): X is I, L or V
  MISC_FEATURE (31)..(31): X is K, R or H for basic amino acids
  MISC_FEATURE (32)..(32): X is K, R or H for basic amino acids
  MISC_FEATURE (33)..(33): X is N or Q for amidated amino acids
  MISC_FEATURE (34)..(34): X is K, R or H for basic amino acids
  MISC_FEATURE (35)..(35): X is I, L  or V
  MISC_FEATURE (36)..(36): X is I, L  or V
  MISC_FEATURE (37)..(37): X is F, W or Y for aromatic amino acids
  MISC_FEATURE (38)..(38): X is F, W or Y for aromatic amino acids
  MISC_FEATURE (39)..(39): X is A or G
  MISC_FEATURE (40)..(40): X is D and E for acidic amino acids
  MISC_FEATURE (41)..(41): X is D and E for acidic amino acids
  MISC_FEATURE (42)..(42): X is I, L or V
  MISC_FEATURE (43)..(43): X is A or G
  MISC_FEATURE (44)..(44): X is C or S
  MISC_FEATURE (45)..(45): X is N or Q for amidated amino acids
  MISC_FEATURE (46)..(46): X is K, R or H for basic amino acids
  MISC_FEATURE (47)..(47): X is A or G
  MISC_FEATURE (48)..(48): X is A or G
  MISC_FEATURE (49)..(49): X is I, L or V
  MISC_FEATURE (50)..(50): X is I, L or V
  MISC_FEATURE (51)..(51): X is A or G
  MISC_FEATURE (52)..(52): X is I, L or V
  MISC_FEATURE (53)..(53): X is M or Nle
  MISC_FEATURE (54)..(54): X is I, L or V
  MISC_FEATURE (55)..(55): X is A or G
  MISC_FEATURE (56)..(56): X is A or G
  MISC_FEATURE (57)..(57): X is I, L or V
  MISC_FEATURE (58)..(58): X is I, L or V
XXXXXXXXXXXXXXXXXXXXXXXXXXXXXXXXXXXXXXXXXXXXXXXXXXXXXXXXXX

SEQ ID NO: 136 - protein, 46 aa, Artificial
  Completely synthesized peptide construct
DGQEEKAGVVSTGLIGGGDAEFRHDSGYEVHHQKLVFFAENVGSNK

SEQ ID NO: 137 - protein, 46 aa, Artificial
  peptide construct
  MISC_FEATURE (1)..(1): X is D and E for acidic amino acids
  MISC_FEATURE (2)..(2): X is A or G
  MISC_FEATURE (3)..(3): X is N or Q for amidated amino acids
  MISC_FEATURE (4)..(4): X is D and E for acidic amino acids
  MISC_FEATURE (5)..(5): X is D and E for acidic amino acids
  MISC_FEATURE (6)..(6): X is K, R or H for basic amino acids
  MISC_FEATURE (7)..(7): X is A or G
  MISC_FEATURE (8)..(8): X is A or G
  MISC_FEATURE (9)..(9): X is I, L or V
  MISC_FEATURE (10)..(10): X is I, L or V
  MISC_FEATURE (11)..(11): X is C or S
  MISC_FEATURE (12)..(12): X is T or S
  MISC_FEATURE (13)..(13): X is A or G
  MISC_FEATURE (14)..(14): X is I, L or V
  MISC_FEATURE (15)..(15): X is I, L or V
  MISC_FEATURE (16)..(16): X is A or G
  MISC_FEATURE (17)..(17): X is A or G
  MISC_FEATURE (18)..(18): X is A or G
  MISC_FEATURE (19)..(19): X is D and E for acidic amino acids
  MISC_FEATURE (20)..(20): X is A or G
  MISC_FEATURE (21)..(21): X is D and E for acidic amino acids
  MISC_FEATURE (22)..(22): X is F, W or Y for aromatic amino acids
  MISC_FEATURE (23)..(23): X is K, R or H for basic amino acids
  MISC_FEATURE (24)..(24): X is K, R or H for basic amino acids
  MISC_FEATURE (25)..(25): X is D and E for basic amino acids
  MISC_FEATURE (26)..(26): X is T or S
  MISC_FEATURE (27)..(27): X is A or G
  MISC_FEATURE (28)..(28): X is F, W or Y for aromatic amino acids
  MISC_FEATURE (29)..(29): X is D and E for acidic amino acids
  MISC_FEATURE (30)..(30): X is I, L or V
  MISC_FEATURE (31)..(31): X is K, R or H for basic amino acids
  MISC_FEATURE (32)..(32): X is K, R or H for basic amino acids
  MISC_FEATURE (33)..(33): X is N or Q for amidated amino acids
  MISC_FEATURE (34)..(34): X is K, R or H for basic amino acids
  MISC_FEATURE (35)..(35): X is I, L or V
  MISC_FEATURE (36)..(36): X is I, L or V
  MISC_FEATURE (37)..(37): X is F, W or Y for aromatic amino acids
  MISC_FEATURE (38)..(38): X is F, W or Y for aromatic amino acids
  MISC_FEATURE (39)..(39): X is A or G
  MISC_FEATURE (40)..(40): X is D and E for acidic amino acids
  MISC_FEATURE (41)..(41): X is D and E for acidic amino acids
  MISC_FEATURE (42)..(42): X is I, L or V
  MISC_FEATURE (43)..(43): X is A or G
  MISC_FEATURE (44)..(44): X is C or S
  MISC_FEATURE (45)..(45): X is N or Q for amidated amino acids
  MISC_FEATURE (46)..(46): X is K, R or H for basic amino acids
XXXXXXXXXXXXXXXXXXXXXXXXXXXXXXXXXXXXXXXXXXXXXX

SEQ ID NO: 138 - protein, 48 aa, Artificial
  Completely synthesized peptide construct
DGQEEKAGVVSTGLIGGGDAEFRHDSGYEVHHQKLVFFAENVGSNKAI

SEQ ID NO: 139 - protein, 48 aa, Artificial
  peptide construct
  MISC_FEATURE (1)..(1): X is D and E for acidic amino acids
  MISC_FEATURE (2)..(2): X is A or G
  MISC_FEATURE (3)..(3): X is N or Q for amidated amino acids
  MISC_FEATURE (4)..(4): X is D and E for acidic amino acids
  MISC_FEATURE (5)..(5): X is D and E for acidic amino acids
  MISC_FEATURE (6)..(6): X is K, R or H for basic amino acids
  MISC_FEATURE (7)..(7): X is A or G
  MISC_FEATURE (8)..(8): X is A or G
  MISC_FEATURE (9)..(9): X is I, L or V
  MISC_FEATURE (10)..(10): X is I, L or V
  MISC_FEATURE (11)..(11): X is C or S
  MISC_FEATURE (12)..(12): X is T or S
  MISC_FEATURE (13)..(13): X is A or G
  MISC_FEATURE (14)..(14): X is I, L or V
  MISC_FEATURE (15)..(15): X is I, L or V
  MISC_FEATURE (16)..(16): X is A or G
  MISC_FEATURE (17)..(17): X is A or G
  MISC_FEATURE (18)..(18): X is A or G
  MISC_FEATURE (19)..(19): X is D and E for acidic amino acids
  MISC_FEATURE (20)..(20): X is A or G
  MISC_FEATURE (21)..(21): X is D and E for acidic amino acids
  MISC_FEATURE (22)..(22): X is F, W or Y for aromatic amino acids
  MISC_FEATURE (23)..(23): X is K, R or H for basic amino acids
  MISC_FEATURE (24)..(24): X is K, R or H for basic amino acids
  MISC_FEATURE (25)..(25): X is D and E for acidic amino acids
  MISC_FEATURE (26)..(26): X is T or S
  MISC_FEATURE (27)..(27): X is A or G
  MISC_FEATURE (28)..(28): X is F, W or Y for aromatic amino acids
  MISC_FEATURE (29)..(29): X is D and E for acidic amino acids
  MISC_FEATURE (30)..(30): X is I, L or V
  MISC_FEATURE (31)..(31): X is K, R or H for basic amino acids
  MISC_FEATURE (32)..(32): X is K, R or H for basic amino acids
  MISC_FEATURE (33)..(33): X is N or Q for amidated amino acids
  MISC_FEATURE (34)..(34): X is K, R or H for basic amino acids
  MISC_FEATURE (35)..(35): X is I, L or V
  MISC_FEATURE (36)..(36): X is I, L or V
  MISC_FEATURE (37)..(37): X is F, W or Y for aromatic amino acids
  MISC_FEATURE (38)..(38): X is F, W or Y for aromatic amino acids
  MISC_FEATURE (39)..(39): X is A or G
  MISC_FEATURE (40)..(40): X is Dand E for acidic amino acids
  MISC_FEATURE (41)..(41): X is Dand E for acidic amino acids
  MISC_FEATURE (42)..(42): X is I, L or V
  MISC_FEATURE (43)..(43): X is A or G
  MISC_FEATURE (44)..(44): X is C or S
  MISC_FEATURE (45)..(45): X is N or Q for amidated amino acids
  MISC_FEATURE (46)..(46): X is K, R or H for basic amino acids
  MISC_FEATURE (47)..(47): X is A or G
  MISC_FEATURE (48)..(48): X is I, L or V
XXXXXXXXXXXXXXXXXXXXXXXXXXXXXXXXXXXXXXXXXXXXXXXX

SEQ ID NO: 140 - protein, 29 aa, Artificial
  Completely synthesized peptide construct
DGQEEKAGVVSTGLIGGGDAEFRHDSGYE

SEQ ID NO: 141 - protein, 29 aa, Artificial
  peptide construct
  MISC_FEATURE (1)..(1): X is D and E for acidic amino acids
  MISC_FEATURE (2)..(2): X is A or G
  MISC_FEATURE (3)..(3): X is N or Q for amidated amino acids
  MISC_FEATURE (4)..(4): X is D and E for acidic amino acids
  MISC_FEATURE (5)..(5): X is D and E for acidic amino acids
  MISC_FEATURE (6)..(6): X is K, R or H for basic amino acids
  MISC_FEATURE (7)..(7): X is A or G
  MISC_FEATURE (8)..(8): X is A or G
  MISC_FEATURE (9)..(9): X is I, L or V
  MISC_FEATURE (10)..(10): X is I, L or V
  MISC_FEATURE (11)..(11): X is C or S
  MISC_FEATURE (12)..(12): X is T or S
  MISC_FEATURE (13)..(13): X is A or G
  MISC_FEATURE (14)..(14): X is I, L or V
  MISC_FEATURE (15)..(15): X is I, L or V
  MISC_FEATURE (16)..(16): X is A or G
  MISC_FEATURE (17)..(17): X is A or G
  MISC_FEATURE (18)..(18): X is A or G
  MISC_FEATURE (19)..(19): X is D and E for acidic amino acids
  MISC_FEATURE (20)..(20): X is A or G
  MISC_FEATURE (21)..(21): X is D and E for acidic amino acids
  MISC_FEATURE (22)..(22): X is F, W or Y for aromatic amino acids
  MISC_FEATURE (23)..(23): X is K, R or H for basic amino acids
  MISC_FEATURE (24)..(24): X is K, R or H for basic amino acids
  MISC_FEATURE (25)..(25): X is D and E for acidic amino acids
  MISC_FEATURE (26)..(26): X is  T or S
  MISC_FEATURE (27)..(27): X is A or G
  MISC_FEATURE (28)..(28): X is F, W or Y for aromatic amino acids
  MISC_FEATURE (29)..(29): X is D and E for acidic amino acids
XXXXXXXXXXXXXXXXXXXXXXXXXXXXX

SEQ ID NO: 142 - protein, 25 aa, Artificial
  Completely synthesized peptide construct
DGQEEKAGVVSTGLIGGGENVGSNK

SEQ ID NO: 143 - protein, 25 aa, Artificial
  peptide construct
  MISC_FEATURE (1)..(1): X is D and E for acidic amino acids
  MISC_FEATURE (2)..(2): X is A or G
  MISC_FEATURE (3)..(3): X is N or Q for amidated amino acids
  MISC_FEATURE (4)..(4): X is D and E for acidic amino acids
  MISC_FEATURE (5)..(5): X is D and E for acidic amino acids
  MISC_FEATURE (6)..(6): X is K, R or H for basic amino acids
  MISC_FEATURE (7)..(7): X is A or G
  MISC_FEATURE (8)..(8): X is A or G
  MISC_FEATURE (9)..(9): X is I, L or V
  MISC_FEATURE (10)..(10): X is I, L or V
  MISC_FEATURE (11)..(11): X is C or S
  MISC_FEATURE (12)..(12): X is T or S
  MISC_FEATURE (13)..(13): X is A or G
  MISC_FEATURE (14)..(14): X is I, L or V
  MISC_FEATURE (15)..(15): X is I, L or V
  MISC_FEATURE (16)..(16): X is A or G
  MISC_FEATURE (17)..(17): X is A or G
  MISC_FEATURE (18)..(18): X is A or G
  MISC_FEATURE (19)..(19): X is D and E for acidic amino acids
  MISC_FEATURE (20)..(20): X is D and E for acidic amino acids
  MISC_FEATURE (21)..(21): X is I, L or V
  MISC_FEATURE (22)..(22): X is A or G
  MISC_FEATURE (23)..(23): X is C or S
  MISC_FEATURE (24)..(24): X is N or Q for amidated amino acids
  MISC_FEATURE (25)..(25): X is K, R or H for basic amino acids
XXXXXXXXXXXXXXXXXXXXXXXXX

SEQ ID NO: 144 - protein, 30 aa, Artificial
  Completely synthesized peptide construct
DGQEEKAGVVSTGLIGGGDAEFRHDSGYEV

SEQ ID NO: 145 - protein, 30 aa, Artificial; identical to SEQ ID NO: 56
  peptide construct
  MISC_FEATURE (1)..(1): X is D and E for acidic amino acids
  MISC_FEATURE (2)..(2): X is A or G
  MISC_FEATURE (3)..(3): X is N or Q for amidated amino acids
  MISC_FEATURE (4)..(4): X is D and E for acidic amino acids
  MISC_FEATURE (5)..(5): X is D and E for acidic amino acids
  MISC_FEATURE (6)..(6): X is K, R or H for basic amino acids
  MISC_FEATURE (7)..(7): X is A or G
  MISC_FEATURE (8)..(8): X is A or G
  MISC_FEATURE (9)..(9): X is I, L or V
  MISC_FEATURE (10)..(10): X is I, L or V
  MISC_FEATURE (11)..(11): X is C or S
  MISC_FEATURE (12)..(12): X is T or S
  MISC_FEATURE (13)..(13): X is A or G
  MISC_FEATURE (14)..(14): X is I, L or V
  MISC_FEATURE (15)..(15): X is I, L or V
  MISC_FEATURE (16)..(16): X is A or G
  MISC_FEATURE (17)..(17): X is A or G
  MISC_FEATURE (18)..(18): X is A or G
  MISC_FEATURE (19)..(19): X is D and E for acidic amino acids
  MISC_FEATURE (20)..(20): X is A or G
  MISC_FEATURE (21)..(21): X is D and E for acidic amino acids
  MISC_FEATURE (22)..(22): X is F, W or Y for aromatic amino acids
  MISC_FEATURE (23)..(23): X is K, R or H for basic amino acids
  MISC_FEATURE (24)..(24): X is K, R or H for basic amino acids
  MISC_FEATURE (25)..(25): X is D and E for acidic amino acids
  MISC_FEATURE (26)..(26): X is T or S
  MISC_FEATURE (27)..(27): X is A or G
  MISC_FEATURE (28)..(28): X is F, W or Y for aromatic amino acids
  MISC_FEATURE (29)..(29): X is D and E for acidic amino acids
  MISC_FEATURE (30)..(30): X is I, L or V

SEQ ID NO: 146 - protein, 28 aa, Artificial
  Completely synthesized peptide construct
DGQEEKAGVVSTGLIGGGDAEFRHDSGY

SEQ ID NO: 147 - protein, 28 aa, Artificial
  peptide construct
  MISC_FEATURE (1)..(1): X is D and E for acidic amino acids
  MISC_FEATURE (2)..(2): X is A or G
  MISC_FEATURE (3)..(3): X is N or Q for amidated amino acids
  MISC_FEATURE (4)..(4): X is D and E for amidated amino acids
  MISC_FEATURE (5)..(5): X is D and E for amidated amino acids
  MISC_FEATURE (6)..(6): X is K, R or H for basic amino acids
  MISC_FEATURE (7)..(7): X is A or G
  MISC_FEATURE (8)..(8): X is A or G
  MISC_FEATURE (9)..(9): X is I, L or V
  MISC_FEATURE (10)..(10): X is I, L or V
  MISC_FEATURE (11)..(11): X is C or S
  MISC_FEATURE (12)..(12): X is T or S
  MISC_FEATURE (13)..(13): X is A or G
  MISC_FEATURE (14)..(14): X is I, L or V
  MISC_FEATURE (15)..(15): X is I, L or V
  MISC_FEATURE (16)..(16): X is A or G
  MISC_FEATURE (17)..(17): X is A or G
  MISC_FEATURE (18)..(18): X is A or G
  MISC_FEATURE (19)..(19): X is D and E for acidic amino acids
  MISC_FEATURE (20)..(20): X is A or G
  MISC_FEATURE (21)..(21): X is D and E for acidic amino acids
  MISC_FEATURE (22)..(22): X is F, W or Y for aromatic amino acids
  MISC_FEATURE (23)..(23): X is K, R or H for basic amino acids
  MISC_FEATURE (24)..(24): X is K, R or H for basic amino acids
  MISC_FEATURE (25)..(25): X is D and E for acidic amino acids
  MISC_FEATURE (26)..(26): X is T or S
  MISC_FEATURE (27)..(27): X is A or G
  MISC_FEATURE (28)..(28): X is F, W or Y for aromatic amino acids
XXXXXXXXXXXXXXXXXXXXXXXXXXXX

SEQ ID NO: 148 - protein, 22 aa, Artificial
  Completely synthesized peptide construct
DGQEEKAGVVSTGLIGGGEFRH

SEQ ID NO: 149 - protein, 22 aa, Artificial
  peptide construct
  MISC_FEATURE (1)..(1): X is D and E for acidic amino acids
  MISC_FEATURE (2)..(2): X is  A or G
  MISC_FEATURE (3)..(3): X is N or Q for aromatic amino acids
  MISC_FEATURE (4)..(4): X is D and E for acidic amino acids
  MISC_FEATURE (5)..(5): X is D and E for acidic amino acids
  MISC_FEATURE (6)..(6): X is K, R or H for basic amino acids
  MISC_FEATURE (7)..(7): X is A or G
  MISC_FEATURE (8)..(8): X is A or G
  MISC_FEATURE (9)..(9): X is I, L or V
  MISC_FEATURE (10)..(10): X is I, L or V
  MISC_FEATURE (11)..(11): X is C or S
  MISC_FEATURE (12)..(12): X is T or S
  MISC_FEATURE (13)..(13): X is A or G
  MISC_FEATURE (14)..(14): X is I, L or V
  MISC_FEATURE (15)..(15): X is I, L or V
  MISC_FEATURE (16)..(16): X is A or G
  MISC_FEATURE (17)..(17): X is A or G
  MISC_FEATURE (18)..(18): X is A or G
  MISC_FEATURE (19)..(19): X is D and E for acidic amino acids
  MISC_FEATURE (20)..(20): X is F or P
  MISC_FEATURE (21)..(21): X is K, R or H for basic amino acids
  MISC_FEATURE (22)..(22): X is K, R or H for basic amino acids
XXXXXXXXXXXXXXXXXXXXXX

SEQ ID NO: 150 - protein, 36 aa, Artificial
  Completely synthesized peptide construct
DGQEEKAGVVSTGLIGGGSAFDVLSFTAEEKAGVYK

SEQ ID NO: 151 - protein, 37 aa, Artificial
  peptide construct
  MISC_FEATURE (1)..(1): X is D and E for acidic amino acids
  MISC_FEATURE (2)..(2): X is A or G
  MISC_FEATURE (3)..(3): X is N or Q for amidated amino acids
  MISC_FEATURE (4)..(4): X is D and E for acidic amino acids
  MISC_FEATURE (5)..(5): X is D and E for acidic amino acids
  MISC_FEATURE (6)..(6): X is K, R or H for basic amino acids
  MISC_FEATURE (7)..(7): X is A or G
  MISC_FEATURE (8)..(8): X is A or G
  MISC_FEATURE (9)..(9): X is I, L or V
  MISC_FEATURE (10)..(10): X is I, L or V
  MISC_FEATURE (11)..(11): X is C or S
  MISC_FEATURE (12)..(12): X is T or S
  MISC_FEATURE (13)..(13): X is A or G
  MISC_FEATURE (14)..(14): X is I, L or V
  MISC_FEATURE (15)..(15): X is I, L or V
  MISC_FEATURE (16)..(16): X is A or G
  MISC_FEATURE (17)..(17): X is A or G
  MISC_FEATURE (18)..(18): X is A or G
  MISC_FEATURE (19)..(19): X is D and E for acidic amino acids
  MISC_FEATURE (20)..(20): X is C or S
  MISC_FEATURE (21)..(21): X is A or G
  MISC_FEATURE (22)..(22): X is F, W or Y for aromatic amino acids
  MISC_FEATURE (23)..(23): X is D and E for acidic amino acids
  MISC_FEATURE (24)..(24): X is I, L or V
  MISC_FEATURE (25)..(25): X is I, L or V
  MISC_FEATURE (26)..(26): X is C or S
  MISC_FEATURE (27)..(27): X is F, W or Y for aromatic amino acids
  MISC_FEATURE (28)..(28): X is T or S
  MISC_FEATURE (29)..(29): X is A or G
  MISC_FEATURE (30)..(30): X is D and E for acidic amino acids
  MISC_FEATURE (31)..(31): X is D and E for acidic amino acids
  MISC_FEATURE (32)..(32): X is K, R or H for basic amino acids
  MISC_FEATURE (33)..(33): X is A or G
  MISC_FEATURE (34)..(34): X is A or G
  MISC_FEATURE (35)..(35): X is I, L or V
  MISC_FEATURE (36)..(36): X is F, W or Y for aromatic amino acids
  MISC_FEATURE (37)..(37): X is K, R or H for basic amino acids
XXXXXXXXXXXXXXXXXXXXXXXXXXXXXXXXXXXXX

SEQ ID NO: 152 - protein, 18 aa, Artificial
  Completely synthesized peptide construct
DGQEEKAGVVSTGLIGGG

SEQ ID NO: 153 - protein, 32 aa, Artificial
  peptide construct
  MISC_FEATURE (1)..(1): X is D and E for acidic amino acids
  MISC_FEATURE (2)..(2): X is A or G
  MISC_FEATURE (3)..(3): X is N or Q for amidated amino acids
  MISC_FEATURE (4)..(4): X is D and E for acidic amino acids
  MISC_FEATURE (5)..(5): X is D and E for acidic amino acids
  MISC_FEATURE (6)..(6): X is K, R or H for basic amino acids
  MISC_FEATURE (7)..(7): X is A or G
  MISC_FEATURE (8)..(8): X is A or G
  MISC_FEATURE (9)..(9): X is I, L or V
  MISC_FEATURE (10)..(10): X is I, L or V
  MISC_FEATURE (11)..(11): X is C or S
  MISC_FEATURE (12)..(12): X is T or S
  MISC_FEATURE (13)..(13): X is A or G
  MISC_FEATURE (14)..(14): X is I, L or V
  MISC_FEATURE (15)..(15): X is I, L or V
  MISC_FEATURE (16)..(16): X is A or G
  MISC_FEATURE (17)..(17): X is A or G
  MISC_FEATURE (18)..(18): X is A or G
  MOD_RES (19)..(19): ACETYLATION
  MISC_FEATURE (19)..(19): X is C or S
  MISC_FEATURE (20)..(20): X is I, L or V
  MISC_FEATURE (21)..(21): X is K, R or H for basic amino acids
  MISC_FEATURE (22)..(22): X is I, L or V
  MISC_FEATURE (23)..(23): X is M or Nle
  MISC_FEATURE (24)..(24): X is A or G
  MISC_FEATURE (25)..(25): X is T or S
  MISC_FEATURE (26)..(26): X is I, L or V
  MISC_FEATURE (27)..(27): X is F or P
  MISC_FEATURE (28)..(28): X is C or S
  MISC_FEATURE (29)..(29): X is T or S
  MISC_FEATURE (30)..(30): X is F, W or Y for aromatic amino acids
  MISC_FEATURE (31)..(31): X is A or G
  MISC_FEATURE (32)..(32): X is C or S
XXXXXXXXXXXXXXXXXXXXXXXXXXXXXXXX

SEQ ID NO: 154 - protein, 32 aa, Artificial; identical to SEQ ID NO: 153
  peptide construct
  MISC_FEATURE (1)..(1): X is D and E for acidic amino acids
  MISC_FEATURE (2)..(2): X is A or G
  MISC_FEATURE (3)..(3): X is N or Q for amidated amino acids
  MISC_FEATURE (4)..(4): X is D and E for acidic amino acids
  MISC_FEATURE (5)..(5): X is D and E for acidic amino acids
  MISC_FEATURE (6)..(6): X is K, R or H for basic amino acids
  MISC_FEATURE (7)..(7): X is A or G
  MISC_FEATURE (8)..(8): X is A or G
  MISC_FEATURE (9)..(9): X is I, L or V
  MISC_FEATURE (10)..(10): X is I, L or V
  MISC_FEATURE (11)..(11): X is C or S
  MISC_FEATURE (12)..(12): X is T or S
  MISC_FEATURE (13)..(13): X is A or G
  MISC_FEATURE (14)..(14): X is I, L or V
  MISC_FEATURE (15)..(15): X is I, L or V
  MISC_FEATURE (16)..(16): X is A or G
  MISC_FEATURE (17)..(17): X is A or G
  MISC_FEATURE (18)..(18): X is A or G
  MISC_FEATURE (19)..(19): X is C or S
  MISC_FEATURE (20)..(20): X is I, L or V
  MISC_FEATURE (21)..(21): X is K, R or H for basic amino acids
  MISC_FEATURE (22)..(22): X is I, L or V
  MISC_FEATURE (23)..(23): X is M or Nle
  MISC_FEATURE (24)..(24): X is A or G
  MISC_FEATURE (25)..(25): X is T or S
  MISC_FEATURE (26)..(26): X is I, L or V
  MISC_FEATURE (27)..(27): X is F or P
  MISC_FEATURE (28)..(28): X is C or S
  MISC_FEATURE (29)..(29): X is C or S
  MISC_FEATURE (30)..(30): X is F, W or Y for aromatic amino acids
  MISC_FEATURE (31)..(31): X is A or G
  MISC_FEATURE (32)..(32): X is T or S

SEQ ID NO: 155 - protein, 29 aa, Artificial
  Completely synthesized peptide construct
DGQEEKAGVVSTGLIGGGNITEIADLTQK

SEQ ID NO: 156 - protein, 29 aa, Artificial
  peptide construct
  MISC_FEATURE (1)..(1): X is D and E for acidic amino acids
  MISC_FEATURE (2)..(2): X is A or G
  MISC_FEATURE (3)..(3): X is N or Q for amidated amino acids
  MISC_FEATURE (4)..(4): X is D and E for acidic amino acids
  MISC_FEATURE (5)..(5): X is D and E for acidic amino acids
  MISC_FEATURE (6)..(6): X is K, R or H for basic amino acids
  MISC_FEATURE (7)..(7): X is A or G
  MISC_FEATURE (8)..(8): X is A or G
  MISC_FEATURE (9)..(9): X is I, L or V
  MISC_FEATURE (10)..(10): X is I, L or V
  MISC_FEATURE (11)..(11): X is C or S
  MISC_FEATURE (12)..(12): X is T or S
  MISC_FEATURE (13)..(13): X is A or G
  MISC_FEATURE (14)..(14): X is I, L or V
  MISC_FEATURE (15)..(15): X is I, L or V
  MISC_FEATURE (16)..(16): X is A or G
  MISC_FEATURE (17)..(17): X is A or G
  MISC_FEATURE (18)..(18): X is A or G
  MISC_FEATURE (19)..(19): X is N or Q for amidated amino acids
  MISC_FEATURE (20)..(20): X is I, L or V
  MISC_FEATURE (21)..(21): X is T or S
  MISC_FEATURE (22)..(22): X is D and E for acidic amino acids
  MISC_FEATURE (23)..(23): X is I, L or V
  MISC_FEATURE (24)..(24): X is A or G
  MISC_FEATURE (25)..(25): X is D and E for acidic amino acids
  MISC_FEATURE (26)..(26): X is I, L or V
  MISC_FEATURE (27)..(27): X is T or S
  MISC_FEATURE (28)..(28): X is N or Q for amidated amino acids
  MISC_FEATURE (29)..(29): X is K, R or H for basic amino acids
XXXXXXXXXXXXXXXXXXXXXXXXXXXXX

SEQ ID NO: 157 - protein, 58 aa, Artificial
  Completely synthesized peptide construct
DGQEEKAGVVSTGLIGGGNMYAMMIARFKMFPEVKEKGMAALPRLIAFTSEHSHFSLK

SEQ ID NO: 158 - protein, 58 aa, Artificial; identical to SEQ ID NO: 135
  peptide construct
  MISC_FEATURE (1)..(1): X is D and E for acidic amino acids
  MISC_FEATURE (2)..(2): X is A or G
  MISC_FEATURE (3)..(3): X is N or Q for amidated amino acids
  MISC_FEATURE (4)..(4): X is D and E for acidic amino acids
  MISC_FEATURE (5)..(5): X is D and E for acidic amino acids
  MISC_FEATURE (6)..(6): X is K, R or H for basic amino acids
  MISC_FEATURE (7)..(7): X is A or G
  MISC_FEATURE (8)..(8): X is A or G
  MISC_FEATURE (9)..(9): X is I, L or V
  MISC_FEATURE (10)..(10): X is I, L or V
  MISC_FEATURE (11)..(11): X is C or S
  MISC_FEATURE (12)..(12): X is T or S
  MISC_FEATURE (13)..(13): X is A or G
  MISC_FEATURE (14)..(14): X is I, L or V
  MISC_FEATURE (15)..(15): X is I, L or V
  MISC_FEATURE (16)..(16): X is A or G
  MISC_FEATURE (17)..(17): X is A or G
  MISC_FEATURE (18)..(18): X is A or G
  MISC_FEATURE (19)..(19): X is N or Q for amidated amino acids
  MISC_FEATURE (20)..(20): X is M or Nle
  MISC_FEATURE (21)..(21): X is F, W or Y for aromatic amino acids
  MISC_FEATURE (22)..(22): X is A or G
  MISC_FEATURE (23)..(23): X is M or Nle
  MISC_FEATURE (24)..(24): X is M or Nle
  MISC_FEATURE (25)..(25): X is I, L or V
  MISC_FEATURE (26)..(26): X is A or G
  MISC_FEATURE (27)..(27): X is K, R or H for basic amino acids
  MISC_FEATURE (28)..(28): X is F, W or Y for aromatic amino acids
  MISC_FEATURE (29)..(29): X is K, R or H for basic amino acids
  MISC_FEATURE (30)..(30): X is M or Nle
  MISC_FEATURE (31)..(31): X is F, W or Y for aromatic amino acids
  MISC_FEATURE (32)..(32): X is F or P
  MISC_FEATURE (33)..(33): X is D and E for acidic amino acids
  MISC_FEATURE (34)..(34): X is I, L or V
  MISC_FEATURE (35)..(35): X is K, R or H for basic amino acids
  MISC_FEATURE (36)..(36): X is D and E for acidic amino acids
  MISC_FEATURE (37)..(37): X is K, R or H for basic amino acids
  MISC_FEATURE (38)..(38): X is A or G
  MISC_FEATURE (39)..(39): X is M or Nle
  MISC_FEATURE (40)..(40): X is A or G
  MISC_FEATURE (41)..(41): X is A or G
  MISC_FEATURE (42)..(42): X is I, L or V
  MISC_FEATURE (43)..(43): X is F or P
  MISC_FEATURE (44)..(44): X is K, R or H for basic amino acids
  MISC_FEATURE (45)..(45): X is I, L or V
  MISC_FEATURE (46)..(46): X is I, L or V
  MISC_FEATURE (47)..(47): X is A or G
  MISC_FEATURE (48)..(48): X is F, W or Y for aromatic amino acids
  MISC_FEATURE (49)..(49): X is T or S
  MISC_FEATURE (50)..(50): X is C or S
  MISC_FEATURE (51)..(51): X is D and E for acidic amino acids
  MISC_FEATURE (52)..(52): X is K, R or H for basic amino acids
  MISC_FEATURE (53)..(53): X is C or S
  MISC_FEATURE (54)..(54): X is K, R or H for basic amino acids
  MISC_FEATURE (55)..(55): X is F, W or Y for aromatic amino acids
  MISC_FEATURE (56)..(56): X is C or S
  MISC_FEATURE (57)..(57): X is I, L or V
  MISC_FEATURE (58)..(58): X is K, R or H for basic amino acids

SEQ ID NO: 159 - protein, 51 aa, Artificial
  Completely synthesized peptide construct
DGQEEKAGVVSTGLIGGGIARFKMFPEVKEKGMAALPRLIATSEHSHFSLK

SEQ ID NO: 160 - protein, 52 aa, Artificial
  peptide construct
  MISC_FEATURE (1)..(1): X is D and E for acidic amino acids
  MISC_FEATURE (2)..(2): X is A or G
  MISC_FEATURE (3)..(3): X is N or Q for aromatic amino acids
  MISC_FEATURE (4)..(4): X is D and E for acidic amino acids
  MISC_FEATURE (5)..(5): X is D and E for acidic amino acids
  MISC_FEATURE (6)..(6): X is K, R or H for basic amino acids
  MISC_FEATURE (7)..(7): X is A or G
  MISC_FEATURE (8)..(8): X is A or G
  MISC_FEATURE (9)..(9): X is I, L or V
  MISC_FEATURE (10)..(10): X is I, L or V
  MISC_FEATURE (11)..(11): X is C or S
  MISC_FEATURE (12)..(12): X is T or S
  MISC_FEATURE (13)..(13): X is A or G
  MISC_FEATURE (14)..(14): X is I, L or V
  MISC_FEATURE (15)..(15): X is I, L or V
  MISC_FEATURE (16)..(16): X is A or G
  MISC_FEATURE (17)..(17): X is A or G
  MISC_FEATURE (18)..(18): X is A or G
  MISC_FEATURE (19)..(19): X is I, L or V
  MISC_FEATURE (20)..(20): X is A or G
  MISC_FEATURE (21)..(21): X is K, R or H for basic amino acids
  MISC_FEATURE (22)..(22): X is F, W or Y for aromatic amino acids
  MISC_FEATURE (23)..(23): X is K, R or H for basic amino acids
  MISC_FEATURE (24)..(24): X is M or Nle
  MISC_FEATURE (25)..(25): X is F, W or Y for aromatic amino acids
  MISC_FEATURE (26)..(26): X is F or P
  MISC_FEATURE (27)..(27): X is D and E for acidic amino acids
  MISC_FEATURE (28)..(28): X is I, L or V
  MISC_FEATURE (29)..(29): X is K, R or H basic amino acids
  MISC_FEATURE (30)..(30): X is D and E for acidic amino acids
  MISC_FEATURE (31)..(31): X is D and E for acidic amino acids
  MISC_FEATURE (32)..(32): X is A or G
  MISC_FEATURE (33)..(33): X is M or Nle
  MISC_FEATURE (34)..(34): X is  A or G
  MISC_FEATURE (35)..(35): X is  A or G
  MISC_FEATURE (36)..(36): X is I, L or V
  MISC_FEATURE (37)..(37): X is F or P
  MISC_FEATURE (38)..(38): X is K, R or H for basic amino acids
  MISC_FEATURE (39)..(39): X is I, L or V
  MISC_FEATURE (40)..(40): X is I, L or V
  MISC_FEATURE (41)..(41): X is A or G
  MISC_FEATURE (42)..(42): X is F, W or Y for aromatic amino acids
  MISC_FEATURE (43)..(43): X is T or S
  MISC_FEATURE (44)..(44): X is C or S
  MISC_FEATURE (45)..(45): X is D and  E for acidic amino acids
  MISC_FEATURE (46)..(46): X is K, R or H basic amino acids
  MISC_FEATURE (47)..(47): X is C or S
  MISC_FEATURE (48)..(48): X is K, R or H basic amino acids
  MISC_FEATURE (49)..(49): X is F, W or Y for aromatic amino acids
  MISC_FEATURE (50)..(50): X is C or S
  MISC_FEATURE (51)..(51): X is I, L or V
  MISC_FEATURE (52)..(52): X is K, R or H basic amino acids
XXXXXXXXXXXXXXXXXXXXXXXXXXXXXXXXXXXXXXXXXXXXXXXXXXXX

SEQ ID NO: 161 - protein, 38 aa, Artificial
  Completely synthesized peptide construct
DGQEEKAGVVSTGLIGGGSRLSKVAPVIKARMMEYGTT

SEQ ID NO: 162 - protein, 38 aa, Artificial
  peptide construct
  MISC_FEATURE (1)..(1): X is D and E for acidic amino acids
  MISC_FEATURE (2)..(2): X is A or G
  MISC_FEATURE (3)..(3): X is N or Q for amidated amino acids
  MISC_FEATURE (4)..(4): X is D and E for acidic amino acids
  MISC_FEATURE (5)..(5): X is D and E for acidic amino acids
  MISC_FEATURE (6)..(6): X is K, R or H for basic amino acids
  MISC_FEATURE (7)..(7): X is A or G
  MISC_FEATURE (8)..(8): X is A or G
  MISC_FEATURE (9)..(9): X is I, L or V
  MISC_FEATURE (10)..(10): X is I, L or V
  MISC_FEATURE (11)..(11): X is C or S
  MISC_FEATURE (12)..(12): X is T or S
  MISC_FEATURE (13)..(13): X is A or G
  MISC_FEATURE (14)..(14): X is I, L or V
  MISC_FEATURE (15)..(15): X is I, L or V
  MISC_FEATURE (16)..(16): X is A  or G
  MISC_FEATURE (17)..(17): X is A  or G
  MISC_FEATURE (18)..(18): X is A  or G
  MISC_FEATURE (19)..(19): X is C or S
  MISC_FEATURE (20)..(20): X is K, R or H for basic amino acids
  MISC_FEATURE (21)..(21): X is I, L or V
  MISC_FEATURE (22)..(22): X is C or S
  MISC_FEATURE (23)..(23): X is K, R or H for basic amino acids
  MISC_FEATURE (24)..(24): X is I, L or V
  MISC_FEATURE (25)..(25): X is A or G
  MISC_FEATURE (26)..(26): X is F or P
  MISC_FEATURE (27)..(27): X is I, L or V
  MISC_FEATURE (28)..(28): X is I, L or V
  MISC_FEATURE (29)..(29): X is K, R or H for basic amino acids
  MISC_FEATURE (30)..(30): X is A or G
  MISC_FEATURE (31)..(31): X is K, R or H for basic amino acids
  MISC_FEATURE (32)..(32): X is M or Nle
  MISC_FEATURE (33)..(33): X is M or Nle
  MISC_FEATURE (34)..(34): X is D and E for acidic amino acids
  MISC_FEATURE (35)..(35): X is F, W or Y for aromatic amino acids
  MISC_FEATURE (36)..(36): X is A or G
  MISC_FEATURE (37)..(37): X is T or S
  MISC_FEATURE (38)..(38): X is T or S
XXXXXXXXXXXXXXXXXXXXXXXXXXXXXXXXXXXXXX

SEQ ID NO: 163 - protein, 37 aa, Artificial
  Completely synthesized peptide construct
DGQEEKAGVVSTGLIGGGIPPSLRYLEDEERMSRLSK

SEQ ID NO: 164 - protein, 36 aa, Artificial
  peptide construct
  MISC_FEATURE (1)..(1): X is D and E for acidic amino acids
  MISC_FEATURE (2)..(2): X is A or G
  MISC_FEATURE (3)..(3): X is N or Q for aromatic amino acids
  MISC_FEATURE (4)..(4): X is D and E for acidic amino acids
  MISC_FEATURE (5)..(5): X is D and E for acidic amino acids
  MISC_FEATURE (6)..(6): X is K, R or H for basic amino acids
  MISC_FEATURE (7)..(7): X is A or G
  MISC_FEATURE (8)..(8): X is A or G
  MISC_FEATURE (9)..(9): X is I, L or V
  MISC_FEATURE (10)..(10): X is I, L or V
  MISC_FEATURE (11)..(11): X is C or S
  MISC_FEATURE (12)..(12): X is T or S
  MISC_FEATURE (13)..(13): X is A or G
  MISC_FEATURE (14)..(14): X is I, L or V
  MISC_FEATURE (15)..(15): X is I, L or V
  MISC_FEATURE (16)..(16): X is A or G
  MISC_FEATURE (17)..(17): X is A or G
  MISC_FEATURE (18)..(18): X is A or G
  MISC_FEATURE (19)..(19): X is I, L or V
  MISC_FEATURE (20)..(20): X is F or P
  MISC_FEATURE (21)..(21): X is F or P
  MISC_FEATURE (22)..(22): X is C or S
  MISC_FEATURE (23)..(23): X is I, L or V
  MISC_FEATURE (24)..(24): X is K, R or H for basic amino acids
  MISC_FEATURE (25)..(25): X is F, W or Y for aromatic amino acids
  MISC_FEATURE (26)..(26): X is D and E for acidic amino acids
  MISC_FEATURE (27)..(27): X is D and E for acidic amino acids
  MISC_FEATURE (28)..(28): X is D and E for acidic amino acids
  MISC_FEATURE (29)..(29): X is D and E for acidic amino acids
  MISC_FEATURE (30)..(30): X is K, R or H for basic amino acids
  MISC_FEATURE (31)..(31): X is M or Nle
  MISC_FEATURE (32)..(32): X is  C or S
  MISC_FEATURE (33)..(33): X is K, R or H for basic amino acids
  MISC_FEATURE (34)..(34): X is I, L or V
  MISC_FEATURE (35)..(35): X is C or S
  MISC_FEATURE (36)..(36): X is K, R or H for basic amino acids
XXXXXXXXXXXXXXXXXXXXXXXXXXXXXXXXXXXX

SEQ ID NO: 165 - protein, 38 aa, Artificial
  Completely synthesized peptide construct
DGQEEKAGVVSTGLIGGGNTNMFTYEIAPVFVLLEYVT

SEQ ID NO: 166 - protein, 38 aa, Artificial; identical to SEQ ID NO: 162
  peptide construct
  MISC_FEATURE (1)..(1): X is D and E for acidic amino acids
  MISC_FEATURE (2)..(2): X is A or G
  MISC_FEATURE (3)..(3): X is N or Q for amidated amino acids
  MISC_FEATURE (4)..(4): X is D and E for acidic amino acids
  MISC_FEATURE (5)..(5): X is D and E for acidic amino acids
  MISC_FEATURE (6)..(6): X is K, R or H for basic amino acids
  MISC_FEATURE (7)..(7): X is  A or G
  MISC_FEATURE (8)..(8): X is  A or G
  MISC_FEATURE (9)..(9): X is I, L or V
  MISC_FEATURE (10)..(10): X is I, L or V
  MISC_FEATURE (11)..(11): X is C or S
  MISC_FEATURE (12)..(12): X is T or S
  MISC_FEATURE (13)..(13): X is A or G
  MISC_FEATURE (14)..(14): X is I, L or V
  MISC_FEATURE (15)..(15): X is I, L or V
  MISC_FEATURE (16)..(16): X is A or G
  MISC_FEATURE (17)..(17): X is A or G
  MISC_FEATURE (18)..(18): X is A or G
  MISC_FEATURE (19)..(19): X is N or Q for amidated amino acids
  MISC_FEATURE (20)..(20): X is T or S
  MISC_FEATURE (21)..(21): X is N or Q for aromatic amino acids
  MISC_FEATURE (22)..(22): X is M or Nle
  MISC_FEATURE (23)..(23): X is F, W or Y for aromatic amino acids
  MISC_FEATURE (24)..(24): X is T or S
  MISC_FEATURE (25)..(25): X is F, W or Y for aromatic amino acids
  MISC_FEATURE (26)..(26): X is D and E for acidic amino acids
  MISC_FEATURE (27)..(27): X is I, L or V
  MISC_FEATURE (28)..(28): X is A or G
  MISC_FEATURE (29)..(29): X is F or P
  MISC_FEATURE (30)..(30): X is I, L or V
  MISC_FEATURE (31)..(31): X is F, W or Y for aromatic amino acids
  MISC_FEATURE (32)..(32): X is I, L or V
  MISC_FEATURE (33)..(33): X is I, L or V
  MISC_FEATURE (34)..(34): X is I, L or V
  MISC_FEATURE (35)..(35): X is D and E for acidic amino acids
  MISC_FEATURE (36)..(36): X is F, W or Y for aromatic amion acids
  MISC_FEATURE (37)..(37): X is I, L or V
  MISC_FEATURE (38)..(38): X is T or S

SEQ ID NO: 167 - protein, 33 aa, Artificial
  Completely synthesized peptide construct
DGQEEKAGVVSTGLIGGGFKADEKKFWGKYLYE

SEQ ID NO: 168 - protein, 33 aa, Artificial; identical to SEQ ID NO: 97
  peptide construct
  MISC_FEATURE (1)..(1): X is D and E for acidic amino acids
  MISC_FEATURE (2)..(2): X is A or G
  MISC_FEATURE (3)..(3): X is N or Q for amidated amino acids
  MISC_FEATURE (4)..(4): X is D and E for acidic amino acids
  MISC_FEATURE (5)..(5): X is D and E for acidic amino acids
  MISC_FEATURE (6)..(6): X is K, R or H for basic amino acids
  MISC_FEATURE (7)..(7): X is A or G
  MISC_FEATURE (8)..(8): X is A or G
  MISC_FEATURE (9)..(9): X is I, L or V
  MISC_FEATURE (10)..(10): X is I, L or V
  MISC_FEATURE (11)..(11): X is C or S
  MISC_FEATURE (12)..(12): X is T or S
  MISC_FEATURE (13)..(13): X is A or G
  MISC_FEATURE (14)..(14): X is I, L or V
  MISC_FEATURE (15)..(15): X is I, L or V
  MISC_FEATURE (16)..(16): X is A or G
  MISC_FEATURE (17)..(17): X is A or G
  MISC_FEATURE (18)..(18): X is A or G
  MISC_FEATURE (19)..(19): X is F, W or Y for aromatic amino acids
  MISC_FEATURE (20)..(20): X is K, R or H for basic amino acids
  MISC_FEATURE (21)..(21): X is  A or G
  MISC_FEATURE (22)..(22): X is D and E for acidic amino acids
  MISC_FEATURE (23)..(23): X is D and E for acidic amino acids
  MISC_FEATURE (24)..(24): X is K, R or H for basic amino acids
  MISC_FEATURE (25)..(25): X is K, R or H for basic amino acids
  MISC_FEATURE (26)..(26): X is F, W or Y for aromatic amino acids
  MISC_FEATURE (27)..(27): X is F, W or Y for aromatic amino acids
  MISC_FEATURE (28)..(28): X is A or G
  MISC_FEATURE (29)..(29): X is K, R or H for basic amino acids
  MISC_FEATURE (30)..(30): X is F, W or Y for aromatic amino acids
  MISC_FEATURE (31)..(31): X is I, L or V
  MISC_FEATURE (32)..(32): X is F, W or Y for aromatic amino acids
  MISC_FEATURE (33)..(33): X is D and E for acidic amino acids

SEQ ID NO: 169 - protein, 33 aa, Artificial
  Completely synthesized peptide construct
DGQEEKAGVVSTGLIGGGSHLVEALYLVCGERG

SEQ ID NO: 170 - protein, 32 aa, Artificial; identical to SEQ ID NO: 153
  peptide construct
  MISC_FEATURE (1)..(1): X is D and E for acidic amino acids
  MISC_FEATURE (2)..(2): X is A or G
  MISC_FEATURE (3)..(3): X is N or Q for amidated amino acids
  MISC_FEATURE (4)..(4): X is D and E for acidic amino acids
  MISC_FEATURE (5)..(5): X is D and E for acidic amino acids
  MISC_FEATURE (6)..(6): X is K, R or H for basic amino acids
  MISC_FEATURE (7)..(7): X is A or G
  MISC_FEATURE (8)..(8): X is A or G
  MISC_FEATURE (9)..(9): X is I, L or V
  MISC_FEATURE (10)..(10): X is I, L or V
  MISC_FEATURE (11)..(11): X is C or S
  MISC_FEATURE (12)..(12): X is T or S
  MISC_FEATURE (13)..(13): X is A or G
  MISC_FEATURE (14)..(14): X is I, L or V
  MISC_FEATURE (15)..(15): X is I, L or V
  MISC_FEATURE (16)..(16): X is A or G
  MISC_FEATURE (17)..(17): X is A or G
  MISC_FEATURE (18)..(18): X is A or G
  MISC_FEATURE (19)..(19): X is C or S
  MISC_FEATURE (20)..(20): X is K, R or H for basic amino acids
  MISC_FEATURE (21)..(21): X is I, L or V
  MISC_FEATURE (22)..(22): X is I, L or V
  MISC_FEATURE (23)..(23): X is D and E for acidic amino acids
  MISC_FEATURE (24)..(24): X is A or G
  MISC_FEATURE (25)..(25): X is I, L or V
  MISC_FEATURE (26)..(26): X is F, W or Y for aromatic amino acids
  MISC_FEATURE (27)..(27): X is I, L or V
  MISC_FEATURE (28)..(28): X is C or S
  MISC_FEATURE (29)..(29): X is A or G
  MISC_FEATURE (30)..(30): X is D and E for acidic amino acids
  MISC_FEATURE (31)..(31): X is K, R or H for basic amino acids
  MISC_FEATURE (32)..(32): X is A or G

SEQ ID NO: 171 - protein, 42 aa, Artificial
  Completely synthesized peptide construct
DGQEEKAGVVSTGLIGGGVLGGGCALLRCIPALDSLTPANED

SEQ ID NO: 172 - protein, 42 aa, Artificial
  peptide construct
  MISC_FEATURE (1)..(1): X is D and E for acidic amino acids
  MISC_FEATURE (2)..(2): X is A or G
  MISC_FEATURE (3)..(3): X is N or Q for amidated amino acids
  MISC_FEATURE (4)..(4): X is D and E for acidic amino acids
  MISC_FEATURE (5)..(5): X is D and E for acidic amino acids
  MISC_FEATURE (6)..(6): X is K, R or H for basic amino acids
  MISC_FEATURE (7)..(7): X is A or G
  MISC_FEATURE (8)..(8): X is A or G
  MISC_FEATURE (9)..(9): X is I, L or V
  MISC_FEATURE (10)..(10): X is I, L or V
  MISC_FEATURE (11)..(11): X is C or S
  MISC_FEATURE (12)..(12): X is T or S
  MISC_FEATURE (13)..(13): X is A or G
  MISC_FEATURE (14)..(14): X is I, L or V
  MISC_FEATURE (15)..(15): X is I, L or V
  MISC_FEATURE (16)..(16): X is A or G
  MISC_FEATURE (17)..(17): X is A or G
  MISC_FEATURE (18)..(18): X is A or G
  MISC_FEATURE (19)..(19): X is I, L or V
  MISC_FEATURE (20)..(20): X is I, L or V
  MISC_FEATURE (21)..(21): X is A or G
  MISC_FEATURE (22)..(22): X is A or G
  MISC_FEATURE (23)..(23): X is A or G
  MISC_FEATURE (24)..(24): X is C or S
  MISC_FEATURE (25)..(25): X is A or G
  MISC_FEATURE (26)..(26): X is I, L or V
  MISC_FEATURE (27)..(27): X is I, L or V
  MISC_FEATURE (28)..(28): X is K, R or H for basic amino acids
  MISC_FEATURE (29)..(29): X is C  or S
  MISC_FEATURE (30)..(30): X is I, L or V
  MISC_FEATURE (31)..(31): X is F or P
  MISC_FEATURE (32)..(32): X is A or G
  MISC_FEATURE (33)..(33): X is I, L or V
  MISC_FEATURE (34)..(34): X is D and E for acidic amino acids
  MISC_FEATURE (35)..(35): X is C or S
  MISC_FEATURE (36)..(36): X is I, L or V
  MISC_FEATURE (37)..(37): X is T or S
  MISC_FEATURE (38)..(38): X is F or P
  MISC_FEATURE (39)..(39): X is A or G
  MISC_FEATURE (40)..(40): X is N or Q for amidated amino acids
  MISC_FEATURE (41)..(41): X is D and E for acidic amino acids
  MISC_FEATURE (42)..(42): X is D and E for acidic amino acids
XXXXXXXXXXXXXXXXXXXXXXXXXXXXXXXXXXXXXXXXXX

SEQ ID NO: 173 - protein, 46 aa, Artificial
  Completely synthesized peptide construct
DGQEEKAGVVSTGLIGGGEACVTSWLWSGEGAVFYRVDLHFINLGT

SEQ ID NO: 174 - protein, 46 aa, Artificial; identical to SEQ ID NO: 137
  peptide construct
  MISC_FEATURE (1)..(1): X is D and E for acidic amino acids
  MISC_FEATURE (2)..(2): X is A or G
  MISC_FEATURE (3)..(3): X is N or Q for amidated amino acids
  MISC_FEATURE (4)..(4): X is D and E for acidic amino acids
  MISC_FEATURE (5)..(5): X is D and E for acidic amino acids
  MISC_FEATURE (6)..(6): X is K, R or H for basic amino acids
  MISC_FEATURE (7)..(7): X is A or G
  MISC_FEATURE (8)..(8): X is A or G
  MISC_FEATURE (9)..(9): X is I, L or V
  MISC_FEATURE (10)..(10): X is I, L or V
  MISC_FEATURE (11)..(11): X is C or S
  MISC_FEATURE (12)..(12): X is T or S
  MISC_FEATURE (13)..(13): X is A or G
  MISC_FEATURE (14)..(14): X is I, L or V
  MISC_FEATURE (15)..(15): X is I, L or V
  MISC_FEATURE (16)..(16): X is A or G
  MISC_FEATURE (17)..(17): X is A or G
  MISC_FEATURE (18)..(18): X is A or G
  MISC_FEATURE (19)..(19): X is D and E for acidic amino acids
  MISC_FEATURE (20)..(20): X is A or G
  MISC_FEATURE (21)..(21): X is C or S
  MISC_FEATURE (22)..(22): X is I, L or V
  MISC_FEATURE (23)..(23): X is T or S
  MISC_FEATURE (24)..(24): X is C or S
  MISC_FEATURE (25)..(25): X is F, W or Y for aromatic amino acids
  MISC_FEATURE (26)..(26): X is I, L or V
  MISC_FEATURE (27)..(27): X is F, W or Y for aromatic amino acids
  MISC_FEATURE (28)..(28): X is C or S
  MISC_FEATURE (29)..(29): X is A or G
  MISC_FEATURE (30)..(30): X is D and E for acidic amino acids
  MISC_FEATURE (31)..(31): X is A or G
  MISC_FEATURE (32)..(32): X is A or G
  MISC_FEATURE (33)..(33): X is I, L or V
  MISC_FEATURE (34)..(34): X is F, W or Y for aromatic amino acids
  MISC_FEATURE (35)..(35): X is F, W or Y for aromatic amino acids
  MISC_FEATURE (36)..(36): X is K, R or H for basic amino acids
  MISC_FEATURE (37)..(37): X is I, L or V
  MISC_FEATURE (38)..(38): X is D and E for acidic amino acids
  MISC_FEATURE (39)..(39): X is I, L or V
  MISC_FEATURE (40)..(40): X is K, R or H for basic amino acids
  MISC_FEATURE (41)..(41): X is F, W or Y for aromatic amino acids
  MISC_FEATURE (42)..(42): X is I, L or V
  MISC_FEATURE (43)..(43): X is N or Q for amidated amino acids
  MISC_FEATURE (44)..(44): X is I, L or V
  MISC_FEATURE (45)..(45): X is A or G
  MISC_FEATURE (46)..(46): X is T or S

SEQ ID NO: 175 - protein, 39 aa, Artificial
  Completely synthesized peptide construct
DGQEEKAGVVSTGLIGGGMDFWCVEHDRPPPATPTSLTT

SEQ ID NO: 176 - protein, 39 aa, Artificial
  peptide construct
  MISC_FEATURE (1)..(1): X is D and E for acidic amino acids
  MISC_FEATURE (2)..(2): X is A or G
  MISC_FEATURE (3)..(3): X is N or Q for amidated amino acids
  MISC_FEATURE (4)..(4): X is D and E for acidic amino acids
  MISC_FEATURE (5)..(5): X is D and E for acidic amino acids
  MISC_FEATURE (6)..(6): X is K, R or H for basic amino acids
  MISC_FEATURE (7)..(7): X is  A or G
  MISC_FEATURE (8)..(8): X is  A or G
  MISC_FEATURE (9)..(9): X is I, L or V
  MISC_FEATURE (10)..(10): X is I, L or V
  MISC_FEATURE (11)..(11): X is C or S
  MISC_FEATURE (12)..(12): X is T or S
  MISC_FEATURE (13)..(13): X is A or G
  MISC_FEATURE (14)..(14): X is I, L or V
  MISC_FEATURE (15)..(15): X is I, L or V
  MISC_FEATURE (16)..(16): X is A or G
  MISC_FEATURE (17)..(17): X is A or G
  MISC_FEATURE (18)..(18): X is A or G
  MISC_FEATURE (19)..(19): X is M or Nle
  MISC_FEATURE (20)..(20): X is D and E for acidic amino acids
  MISC_FEATURE (21)..(21): X is F, W or Y for aromatic amino acids
  MISC_FEATURE (22)..(22): X is F, W or Y for aromatic amino acids
  MISC_FEATURE (23)..(23): X is C or S
  MISC_FEATURE (24)..(24): X is I, L or V
  MISC_FEATURE (25)..(25): X is D and E for acidic amino acids
  MISC_FEATURE (26)..(26): X is K, R or H for basic amino acids
  MISC_FEATURE (27)..(27): X is D and E for acidic amino acids
  MISC_FEATURE (28)..(28): X is K, R or H for basic amino acids
  MISC_FEATURE (29)..(29): X is F or P
  MISC_FEATURE (30)..(30): X is F or P
  MISC_FEATURE (31)..(31): X is F or P
  MISC_FEATURE (32)..(32): X is A  or G
  MISC_FEATURE (33)..(33): X is T or S
  MISC_FEATURE (34)..(34): X is F or P
  MISC_FEATURE (35)..(35): X is T or S
  MISC_FEATURE (36)..(36): X is C or S
  MISC_FEATURE (37)..(37): X is I, L or V
  MISC_FEATURE (38)..(38): X is T or S
  MISC_FEATURE (39)..(39): X is T or S
XXXXXXXXXXXXXXXXXXXXXXXXXXXXXXXXXXXXXXX

SEQ ID NO: 177 - protein, 38 aa, Artificial
  Completely synthesized peptide construct
DGQEEKAGVVSTGLIGGGNMYAMMIARFKMFPEVKEKG

SEQ ID NO: 178 - protein, 38 aa, Artificial; identical to SEQ ID NO: 162
  peptide construct
  MISC_FEATURE (1)..(1): X is D and E for acidic amino acids
  MISC_FEATURE (2)..(2): X is A or G
  MISC_FEATURE (3)..(3): X is N or Q for amidated amino acids
  MISC_FEATURE (4)..(4): X is D and E for acidic amino acids
  MISC_FEATURE (5)..(5): X is D and E for acidic amino acids
  MISC_FEATURE (6)..(6): X is K, R or H for basic amino acids
  MISC_FEATURE (7)..(7): X is A or G
  MISC_FEATURE (8)..(8): X is A or G
  MISC_FEATURE (9)..(9): X is I, L or V
  MISC_FEATURE (10)..(10): X is I, L or V
  MISC_FEATURE (11)..(11): X is C or S
  MISC_FEATURE (12)..(12): X is T or S
  MISC_FEATURE (13)..(13): X is A or G
  MISC_FEATURE (14)..(14): X is I, L or V
  MISC_FEATURE (15)..(15): X is I, L or V
  MISC_FEATURE (16)..(16): X is A or G
  MISC_FEATURE (17)..(17): X is A or G
  MISC_FEATURE (18)..(18): X is A or G
  MISC_FEATURE (19)..(19): X is N or Q for amidated amino acids
  MISC_FEATURE (20)..(20): X is M or Nle
  MISC_FEATURE (21)..(21): X is F, W or Y for aromatic amino acids
  MISC_FEATURE (22)..(22): X is A or G
  MISC_FEATURE (23)..(23): X is M or Nle
  MISC_FEATURE (24)..(24): X is M or Nle
  MISC_FEATURE (25)..(25): X is I, L or V
  MISC_FEATURE (26)..(26): X is A or G
  MISC_FEATURE (27)..(27): X is K, R or H for basic amino acids
  MISC_FEATURE (28)..(28): X is F, W or Y for aromatic amino acids
  MISC_FEATURE (29)..(29): X is K, R or H for basic amino acids
  MISC_FEATURE (30)..(30): X is M or Nle
  MISC_FEATURE (31)..(31): X is F, W or Y for aromatic amino acids
  MISC_FEATURE (32)..(32): X is F or P
  MISC_FEATURE (33)..(33): X is D and E for acidic amino acids
  MISC_FEATURE (34)..(34): X is I, L or V
  MISC_FEATURE (35)..(35): X is K, R or H for basic amino acids
  MISC_FEATURE (36)..(36): X is D and E for acidic amino acids
  MISC_FEATURE (37)..(37): X is K, R or H for basic amino acids
  MISC_FEATURE (38)..(38): X is A or G

SEQ ID NO: 179 - protein, 51 aa, Artificial
  Completely synthesized peptide construct
DGQEEKAGVVSTGLIGGGNMYAMMIARFKMFPEVKEKGMAALPRLIAFTSE

SEQ ID NO: 180 - protein, 51 aa, Artificial
  peptide construct
  MISC_FEATURE (1)..(1): X is D and E for acidic amino acids
  MISC_FEATURE (2)..(2): X is A or G
  MISC_FEATURE (3)..(3): X is N or Q for amidated amino acids
  MISC_FEATURE (4)..(4): X is D and E for acidic amino acids
  MISC_FEATURE (5)..(5): X is D and E for acidic amino acids
  MISC_FEATURE (6)..(6): X is K, R or H for basic amino acids
  MISC_FEATURE (7)..(7): X is A or G
  MISC_FEATURE (8)..(8): X is A or G
  MISC_FEATURE (9)..(9): X is I, L or V
  MISC_FEATURE (10)..(10): X is I, L or V
  MISC_FEATURE (11)..(11): X is C or S
  MISC_FEATURE (12)..(12): X is T or S
  MISC_FEATURE (13)..(13): X is A or G
  MISC_FEATURE (14)..(14): X is I, L or V
  MISC_FEATURE (15)..(15): X is I, L or V
  MISC_FEATURE (16)..(16): X is A or G
  MISC_FEATURE (17)..(17): X is A or G
  MISC_FEATURE (18)..(18): X is A or G
  MISC_FEATURE (19)..(19): X is N or Q for amidated amino acids
  MISC_FEATURE (20)..(20): X is M or Nle
  MISC_FEATURE (21)..(21): X is F, W or Y for aromatic amino acids
  MISC_FEATURE (22)..(22): X is A or G
  MISC_FEATURE (23)..(23): X is M or Nle
  MISC_FEATURE (24)..(24): X is M or Nle
  MISC_FEATURE (25)..(25): X is I, L or V
  MISC_FEATURE (26)..(26): X is A or G
  MISC_FEATURE (27)..(27): X is K, R or H for basic amino acids
  MISC_FEATURE (28)..(28): X is F, W or Y for aromatic amino acids
  MISC_FEATURE (29)..(29): X is K, R or H for basic amino acids
  MISC_FEATURE (30)..(30): X is M or Nle
  MISC_FEATURE (31)..(31): X is F, W or Y for aromatic amino acids
  MISC_FEATURE (32)..(32): X is F or P
  MISC_FEATURE (33)..(33): X is D and E for acidic amino acids
  MISC_FEATURE (34)..(34): X is I, L or V
  MISC_FEATURE (35)..(35): X is K, R or H for basic amino acids
  MISC_FEATURE (36)..(36): X is D and E for acidic amino acids
  MISC_FEATURE (37)..(37): X is K, R or H for basic amino acids
  MISC_FEATURE (38)..(38): X is A or G
  MISC_FEATURE (39)..(39): X is M or Nle
  MISC_FEATURE (40)..(40): X is A or G
  MISC_FEATURE (41)..(41): X is A or G
  MISC_FEATURE (42)..(42): X is I, L or V
  MISC_FEATURE (43)..(43): X is F or P
  MISC_FEATURE (44)..(44): X is K, R or H for basic amino acids
  MISC_FEATURE (45)..(45): X is I, L or V
  MISC_FEATURE (46)..(46): X is I, L or V
  MISC_FEATURE (47)..(47): X is A or G
  MISC_FEATURE (48)..(48): X is F, W or Y for aromatic amino acids
  MISC_FEATURE (49)..(49): X is T or S
  MISC_FEATURE (50)..(50): X is C or S
  MISC_FEATURE (51)..(51): X is D and E for acidic amino acids
XXXXXXXXXXXXXXXXXXXXXXXXXXXXXXXXXXXXXXXXXXXXXXXXXXX

SEQ ID NO: 181 - protein, 31 aa, Artificial
  Completely synthesized peptide construct
DGQEEKAGVVSTGLIGGGIAFTSEHSHFSLK

SEQ ID NO: 182 - protein, 31 aa, Artificial; identical to SEQ ID NO: 123
  peptide construct
  MISC_FEATURE (1)..(1): X is D and E for acidic amino acids
  MISC_FEATURE (2)..(2): X is A or G
  MISC_FEATURE (3)..(3): X is N or Q for amidated amino acids
  MISC_FEATURE (4)..(4): X is D and E for acidic amino acids
  MISC_FEATURE (5)..(5): X is D and E for acidic amino acids
  MISC_FEATURE (6)..(6): X is K, R or H for basic amino acids
  MISC_FEATURE (7)..(7): X is A or G
  MISC_FEATURE (8)..(8): X is A or G
  MISC_FEATURE (9)..(9): X is I, L or V
  MISC_FEATURE (10)..(10): X is I, L or V
  MISC_FEATURE (11)..(11): X is C or S
  MISC_FEATURE (12)..(12): X is T or S
  MISC_FEATURE (13)..(13): X is A or G
  MISC_FEATURE (14)..(14): X is I, L or V
  MISC_FEATURE (15)..(15): X is I, L or V
  MISC_FEATURE (16)..(16): X is A or G
  MISC_FEATURE (17)..(17): X is A or G
  MISC_FEATURE (18)..(18): X is A or G
  MISC_FEATURE (19)..(19): X is I, L or V
  MISC_FEATURE (20)..(20): X is A or G
  MISC_FEATURE (21)..(21): X is F, W or Y for aromatic amino acids
  MISC_FEATURE (22)..(22): X is T or S
  MISC_FEATURE (23)..(23): X is C or S
  MISC_FEATURE (24)..(24): X is D and E for acidic amino acids
  MISC_FEATURE (25)..(25): X is K, R or H for basic amino acids
  MISC_FEATURE (26)..(26): X is C or S
  MISC_FEATURE (27)..(27): X is K, R or H for basic amino acids
  MISC_FEATURE (28)..(28): X is F, W or Y for aromatic amino acids
  MISC_FEATURE (29)..(29): X is C or S
  MISC_FEATURE (30)..(30): X is I, L or V
  MISC_FEATURE (31)..(31): X is K, R or H for basic amino acids

SEQ ID NO: 183 - protein, 39 aa, Artificial; identical to SEQ ID NO: 176
  peptide construct
  MISC_FEATURE (1)..(1): X is D and E for acicid amino acids
  MISC_FEATURE (2)..(2): X is A or G
  MISC_FEATURE (3)..(3): X is N or Q for amidated amino acids
  MISC_FEATURE (4)..(4): X is D and E for acidic amino acids
  MISC_FEATURE (5)..(5): X is D and E for acidic amino acids
  MISC_FEATURE (6)..(6): X is K, R or H for basic amino acids
  MISC_FEATURE (7)..(7): X is A or G
  MISC_FEATURE (8)..(8): X is A or G
  MISC_FEATURE (9)..(9): X is I, L or V
  MISC_FEATURE (10)..(10): X is I, L or V
  MISC_FEATURE (11)..(11): X is C or S
  MISC_FEATURE (12)..(12): X is T or S
  MISC_FEATURE (13)..(13): X is A or G
  MISC_FEATURE (14)..(14): X is I, L or V
  MISC_FEATURE (15)..(15): X is I, L or V
  MISC_FEATURE (16)..(16): X is A or G
  MISC_FEATURE (17)..(17): X is A or G
  MISC_FEATURE (18)..(18): X is A or G
  MISC_FEATURE (19)..(19): X is M or Nle
  MISC_FEATURE (20)..(20): X is D and E for acidic amino acids
  MISC_FEATURE (21)..(21): X is F, W or Y for aromatic amino acids
  MISC_FEATURE (22)..(22): X is F, W or Y for aromatic amino acids
  MISC_FEATURE (23)..(23): X is C or S
  MISC_FEATURE (24)..(24): X is I, L or V
  MISC_FEATURE (25)..(25): X is D and E for acidic amino acids
  MISC_FEATURE (26)..(26): X is K, R or H for basic amino acids
  MISC_FEATURE (27)..(27): X is D and E for acidic amino acids
  MISC_FEATURE (28)..(28): X is K, R or H for basic amino acids
  MISC_FEATURE (29)..(29): X is F or P
  MISC_FEATURE (30)..(30): X is F or P
  MISC_FEATURE (31)..(31): X is F or P
  MISC_FEATURE (32)..(32): X is A or G
  MISC_FEATURE (33)..(33): X is T or S
  MISC_FEATURE (34)..(34): X is F or P
  MISC_FEATURE (35)..(35): X is T or S
  MISC_FEATURE (36)..(36): X is C or S
  MISC_FEATURE (37)..(37): X is I, L or V
  MISC_FEATURE (38)..(38): X is T or S
  MISC_FEATURE (39)..(39): X is T or S

SEQ ID NO: 184 - protein, 28 aa, Artificial
  Completely synthesized peptide construct
DGQEEKAGVVSTGLIGGGERPTLAFLQD

SEQ ID NO: 185 - protein, 28 aa, Artificial
  peptide construct
  MISC_FEATURE (1)..(1): X is D and E for acidic amino acids
  MISC_FEATURE (2)..(2): X is A or G
  MISC_FEATURE (3)..(3): X is N or Q for amidated amino acids
  MISC_FEATURE (4)..(4): X is D and E for acidic amino acids
  MISC_FEATURE (5)..(5): X is D and E for acidic amino acids
  MISC_FEATURE (6)..(6): X is K, R or H for basic amino acids
  MISC_FEATURE (7)..(7): X is A or G
  MISC_FEATURE (8)..(8): X is A or G
  MISC_FEATURE (9)..(9): X is I, L or V
  MISC_FEATURE (10)..(10): X is I, L or V
  MISC_FEATURE (11)..(11): X is C or S
  MISC_FEATURE (12)..(12): X is T or S
  MISC_FEATURE (13)..(13): X is A or G
  MISC_FEATURE (14)..(14): X is I, L or V
  MISC_FEATURE (15)..(15): X is I, L or V
  MISC_FEATURE (16)..(16): X is A or G
  MISC_FEATURE (17)..(17): X is A or G
  MISC_FEATURE (18)..(18): X is A or G
  MISC_FEATURE (19)..(19): X is D and E for acidic amino acids
  MISC_FEATURE (20)..(20): X is K, R or H for basic amino acids
  MISC_FEATURE (21)..(21): X is F or P
  MISC_FEATURE (22)..(22): X is T or S
  MISC_FEATURE (23)..(23): X is I, L or V
  MISC_FEATURE (24)..(24): X is A or G
  MISC_FEATURE (25)..(25): X is F, W or Y for aromatic amino acids
  MISC_FEATURE (26)..(26): X is I, L or V
  MISC_FEATURE (27)..(27): X is N or Q for amidated amino acids
  MISC_FEATURE (28)..(28): X is D and E for acidic amino acids
XXXXXXXXXXXXXXXXXXXXXXXXXXXX

SEQ ID NO: 186 - protein, 28 aa, Artificial
  Completely synthesized peptide construct
DGQEEKAGVVSTGLIGGGDRSTKVIDFH

SEQ ID NO: 187 - protein, 28 aa, Artificial
  peptide construct
  MISC_FEATURE (1)..(1): X is D and E for acidic amino acids
  MISC_FEATURE (2)..(2): X is A or G
  MISC_FEATURE (3)..(3): X is N or Q for amidated amino acids
  MISC_FEATURE (4)..(4): X is D and E for acidic amino acids
  MISC_FEATURE (5)..(5): X is D and E for acidic amino acids
  MISC_FEATURE (6)..(6): X is K, R or H for basic amino acids
  MISC_FEATURE (7)..(7): X is A or G
  MISC_FEATURE (8)..(8): X is A or G
  MISC_FEATURE (9)..(9): X is I, L or V
  MISC_FEATURE (10)..(10): X is I, L or V
  MISC_FEATURE (11)..(11): X is C or S
  MISC_FEATURE (12)..(12): X is  Tor S
  MISC_FEATURE (13)..(13): X is A or G
  MISC_FEATURE (14)..(14): X is I, L or V
  MISC_FEATURE (15)..(15): X is I, L or V
  MISC_FEATURE (16)..(16): X is A or G
  MISC_FEATURE (17)..(17): X is A or G
  MISC_FEATURE (18)..(18): X is A or G
  MISC_FEATURE (19)..(19): X is D and E for acidic amino acids
  MISC_FEATURE (20)..(20): X is K, R or H for basic amino acids
  MISC_FEATURE (21)..(21): X is C or S
  MISC_FEATURE (22)..(22): X is T or S
  MISC_FEATURE (23)..(23): X is K, R or H for basic amino acids
  MISC_FEATURE (24)..(24): X is I, L or V
  MISC_FEATURE (25)..(25): X is I, L or V
  MISC_FEATURE (26)..(26): X is D and E for acidic amino acids
  MISC_FEATURE (27)..(27): X is F, W or Y for aromatic amino acids
  MISC_FEATURE (28)..(28): X is K, R or H for basic amino acids
XXXXXXXXXXXXXXXXXXXXXXXXXXXX

SEQ ID NO: 188 - protein, 31 aa, Artificial
  Completely synthesized peptide construct
DGQEEKAGVVSTGLIGGGIAGFKGEQGPKGE

SEQ ID NO: 189 - protein, 31 aa, Artificial; identical to SEQ ID NO: 123
  peptide construct
  MISC_FEATURE (1)..(1): X is D and E for acidic amino acids
  MISC_FEATURE (2)..(2): X is A or G
  MISC_FEATURE (3)..(3): X is N or Q for amidated amino acids
  MISC_FEATURE (4)..(4): X is D and E for acidic amino acids
  MISC_FEATURE (5)..(5): X is D and E for acidic amino acids
  MISC_FEATURE (6)..(6): X is K, R or H for basic amino acids
  MISC_FEATURE (7)..(7): X is A or G
  MISC_FEATURE (8)..(8): X is A or G
  MISC_FEATURE (9)..(9): X is I, L or V
  MISC_FEATURE (10)..(10): X is I, L or V
  MISC_FEATURE (11)..(11): X is C or S
  MISC_FEATURE (12)..(12): X is T or S
  MISC_FEATURE (13)..(13): X is A or G
  MISC_FEATURE (14)..(14): X is I, L or V
  MISC_FEATURE (15)..(15): X is I, L or V
  MISC_FEATURE (16)..(16): X is A or G
  MISC_FEATURE (17)..(17): X is A or G
  MISC_FEATURE (18)..(18): X is A or G
  MISC_FEATURE (19)..(19): X is I, L or V
  MISC_FEATURE (20)..(20): X is A or G
  MISC_FEATURE (21)..(21): X is A or G
  MISC_FEATURE (22)..(22): X is F, W or Y for aromatic amino acids
  MISC_FEATURE (23)..(23): X is K, R or H for basic amino acids
  MISC_FEATURE (24)..(24): X is A or G
  MISC_FEATURE (25)..(25): X is D and E for acidic amino acids
  MISC_FEATURE (26)..(26): X is N or Q for amidated amino acids
  MISC_FEATURE (27)..(27): X is A or G
  MISC_FEATURE (28)..(28): X is F or P
  MISC_FEATURE (29)..(29): X is K, R or H for basic amino acids
  MISC_FEATURE (30)..(30): X is A or G
  MISC_FEATURE (31)..(31): X is D and E for acidic amino acids

SEQ ID NO: 190 - protein, 4 aa, Artificial
  Completely synthesized peptide construct
  MISC_FEATURE (1)..(1): X is TEST TEST TEST TEST TEST
  misc_feature (2)..(4): Xaa can be any naturally occurring amino acid
XXXX

SEQ ID NO: 191 - protein, 18 aa, Artificial
  peptide construct
  MISC_FEATURE (1)..(1): X is D and E for acidic amino acids
  MISC_FEATURE (2)..(2): X is A or G
  MISC_FEATURE (3)..(3): X is N or Q for amidated amino acids
  MISC_FEATURE (4)..(4): X is D and E for acidic amino acids
  MISC_FEATURE (5)..(5): X is D and E for acidic amino acids
  MISC_FEATURE (6)..(6): X is K, R or H for basic amino acids
  MISC_FEATURE (7)..(7): X is A or G
  MISC_FEATURE (8)..(8): X is A or G
  MISC_FEATURE (9)..(9): X is I, L or V
  MISC_FEATURE (10)..(10): X is I, L or V
  MISC_FEATURE (11)..(11): X is C or S
  MISC_FEATURE (12)..(12): X is T or S
  MISC_FEATURE (13)..(13): X is A or G
  MISC_FEATURE (14)..(14): X is I, L or V
  MISC_FEATURE (15)..(15): X is I, L or V
  MISC_FEATURE (16)..(16): X is A or G
  MISC_FEATURE (17)..(17): X is A or G
  MISC_FEATURE (18)..(18): X is A or G
XXXXXXXXXXXXXXXXXX

SEQ ID NO: 192 - protein, 26 aa, Artificial
  Completely synthesized peptide construct
DGQEEKAGVVSTGLIGGGKNIVTPRT

SEQ ID NO: 193 - protein, 26 aa, Artificial
  peptide construct
  MISC_FEATURE (1)..(1): X is D and E for acidic amino acids
  MISC_FEATURE (2)..(2): X is A or G
  MISC_FEATURE (3)..(3): X is N or Q for amidated amino acids
  MISC_FEATURE (4)..(4): X is D and E for acidic amino acids
  MISC_FEATURE (5)..(5): X is D and E for acidic amino acids
  MISC_FEATURE (6)..(6): X is K, R or H for basic amino acids
  MISC_FEATURE (7)..(7): X is A or G
  MISC_FEATURE (8)..(8): X is A or G
  MISC_FEATURE (9)..(9): X is I, L or V
  MISC_FEATURE (10)..(10): X is I, L or V
  MISC_FEATURE (11)..(11): X is C or S
  MISC_FEATURE (12)..(12): X is T or S
  MISC_FEATURE (13)..(13): X is A or G
  MISC_FEATURE (14)..(14): X is I, L or V
  MISC_FEATURE (15)..(15): X is I, L or V
  MISC_FEATURE (16)..(16): X is A or G
  MISC_FEATURE (17)..(17): X is A or G
  MISC_FEATURE (18)..(18): X is A or G
  MISC_FEATURE (19)..(19): X is K, R or H for basic amino acids
  MISC_FEATURE (20)..(20): X is N or Q for amidated amino acids
  MISC_FEATURE (21)..(21): X is I, L or V
  MISC_FEATURE (22)..(22): X is I, L or V
  MISC_FEATURE (23)..(23): X is T or S
  MISC_FEATURE (24)..(24): X is F or P
  MISC_FEATURE (25)..(25): X is K, R or H for basic amino acids
  MISC_FEATURE (26)..(26): X is T or  S
XXXXXXXXXXXXXXXXXXXXXXXXXX

SEQ ID NO: 194 - protein, 33 aa, Artificial
  Completely synthesized peptide construct
DGQEEKAGVVSTGLIGGGGDKVSFFCKNKEKKC

SEQ ID NO: 195 - protein, 33 aa, Artificial; identical to SEQ ID NO: 97
  peptide construct
  MISC_FEATURE (1)..(1): X is D and E for acidic amino acids
  MISC_FEATURE (2)..(2): X is A or G
  MISC_FEATURE (3)..(3): X is N or Q for amidated amino acids
  MISC_FEATURE (4)..(4): X is D and E for acidic amino acids
  MISC_FEATURE (5)..(5): X is D and E for acidic amino acids
  MISC_FEATURE (6)..(6): X is K, R or H for basic amino acids
  MISC_FEATURE (7)..(7): X is A or G
  MISC_FEATURE (8)..(8): X is A or G
  MISC_FEATURE (9)..(9): X is I, L or V
  MISC_FEATURE (10)..(10): X is I, L or V
  MISC_FEATURE (11)..(11): X is C or S
  MISC_FEATURE (12)..(12): X is T or S
  MISC_FEATURE (13)..(13): X is A or G
  MISC_FEATURE (14)..(14): X is I, L or V
  MISC_FEATURE (15)..(15): X is I, L or V
  MISC_FEATURE (16)..(16): X is A or G
  MISC_FEATURE (17)..(17): X is A or G
  MISC_FEATURE (18)..(18): X is A or G
  MISC_FEATURE (19)..(19): X is A or G
  MISC_FEATURE (20)..(20): X is D and E for acidic amino acids
  MISC_FEATURE (21)..(21): X is K, R or H for basic amino acids
  MISC_FEATURE (22)..(22): X is I, L or V
  MISC_FEATURE (23)..(23): X is C or S
  MISC_FEATURE (24)..(24): X is F, W or Y for aromatic amino acids
  MISC_FEATURE (25)..(25): X is F, W or Y for aromatic amino acids
  MISC_FEATURE (26)..(26): X is C or S
  MISC_FEATURE (27)..(27): X is K, R or H for basic amino acids
  MISC_FEATURE (28)..(28): X is N or Q for amidated amino acids
  MISC_FEATURE (29)..(29): X is K, R or H for basic amino acids
  MISC_FEATURE (30)..(30): X is D and E for acidic amino acids
  MISC_FEATURE (31)..(31): X is K, R or H for basic amino acids
  MISC_FEATURE (32)..(32): X is K, R or H for basic amino acids
  MISC_FEATURE (33)..(33): X is C or S

SEQ ID NO: 196 - protein, 35 aa, Artificial
  Completely synthesized peptide construct
DGQEEKAGVVSTGLIGGGEIIVTHFPFDEQNCSMK

SEQ ID NO: 197 - protein, 35 aa, Artificial
  peptide construct
  MISC_FEATURE (1)..(1): X is D and E for acidic amino acids
  MISC_FEATURE (2)..(2): X is A or G
  MISC_FEATURE (3)..(3): X is N or Q for amidated amino acids
  MISC_FEATURE (4)..(4): X is D and E for acidic amino acids
  MISC_FEATURE (5)..(5): X is D and E for acidic amino acids
  MISC_FEATURE (6)..(6): X is K, R or H for basic amino acids
  MISC_FEATURE (7)..(7): X is A or G
  MISC_FEATURE (8)..(8): X is A or G
  MISC_FEATURE (9)..(9): X is I, L or V
  MISC_FEATURE (10)..(10): X is I, L or V
  MISC_FEATURE (11)..(11): X is C or S
  MISC_FEATURE (12)..(12): X is T or S
  MISC_FEATURE (13)..(13): X is A or G
  MISC_FEATURE (14)..(14): X is I, L or V
  MISC_FEATURE (15)..(15): X is I, L or V
  MISC_FEATURE (16)..(16): X is A or G
  MISC_FEATURE (17)..(17): X is A or G
  MISC_FEATURE (18)..(18): X is A or G
  MISC_FEATURE (19)..(19): X is D and E for acidic amino acids
  MISC_FEATURE (20)..(20): X is I, L or V
  MISC_FEATURE (21)..(21): X is I, L or V
  MISC_FEATURE (22)..(22): X is I, L or V
  MISC_FEATURE (23)..(23): X is T or S
  MISC_FEATURE (24)..(24): X is K, R or H for basic amino acids
  MISC_FEATURE (25)..(25): X is F, W or Y for aromatic amino acids
  MISC_FEATURE (26)..(26): X is F or P
  MISC_FEATURE (27)..(27): X is F, W or Y for aromatic amino acids
  MISC_FEATURE (28)..(28): X is D and E for acidic amino acids
  MISC_FEATURE (29)..(29): X is D and E for acidic amino acids
  MISC_FEATURE (30)..(30): X is N or Q for amidated amino acids
  MISC_FEATURE (31)..(31): X is N or Q for amidated amino acids
  MISC_FEATURE (32)..(32): X is C or S
  MISC_FEATURE (33)..(33): X is C or S
  MISC_FEATURE (34)..(34): X is M or Nle
  MISC_FEATURE (35)..(35): X is K, R or H for basic  amino acids
XXXXXXXXXXXXXXXXXXXXXXXXXXXXXXXXXXX

SEQ ID NO: 198 - protein, 31 aa, Artificial
  Completely synthesized peptide construct
DGQEEKAGVVSTGLIGGGVHFFKNIVTPRTP

SEQ ID NO: 199 - protein, 31 aa, Artificial; identical to SEQ ID NO: 123
  peptide construct
  MISC_FEATURE (1)..(1): X is D and E for acidic amino acids
  MISC_FEATURE (2)..(2): X is A or G
  MISC_FEATURE (3)..(3): X is N or Q for amidated amino acids
  MISC_FEATURE (4)..(4): X is D and E for acidic amino acids
  MISC_FEATURE (5)..(5): X is D and E for acidic amino acids
  MISC_FEATURE (6)..(6): X is K, R or H for basic amino acids
  MISC_FEATURE (7)..(7): X is A or G
  MISC_FEATURE (8)..(8): X is A or G
  MISC_FEATURE (9)..(9): X is I, L or V
  MISC_FEATURE (10)..(10): X is I, L or V
  MISC_FEATURE (11)..(11): X is C or S
  MISC_FEATURE (12)..(12): X is T or S
  MISC_FEATURE (13)..(13): X is A or G
  MISC_FEATURE (14)..(14): X is I, L or V
  MISC_FEATURE (15)..(15): X is I, L or V
  MISC_FEATURE (16)..(16): X is A or G
  MISC_FEATURE (17)..(17): X is A or G
  MISC_FEATURE (18)..(18): X is A or G
  MISC_FEATURE (19)..(19): X is I, L or V
  MISC_FEATURE (20)..(20): X is K, R or H for basic amino acids
  MISC_FEATURE (21)..(21): X is F, W or Y for aromatic amino acids
  MISC_FEATURE (22)..(22): X is F, W or Y for aromatic amino acids
  MISC_FEATURE (23)..(23): X is K,  R or H for basic amino acids
  MISC_FEATURE (24)..(24): X is N or Q for amidated amino acids
  MISC_FEATURE (25)..(25): X is I, L or V
  MISC_FEATURE (26)..(26): X is I, L or V
  MISC_FEATURE (27)..(27): X is T or S
  MISC_FEATURE (28)..(28): X is F or P
  MISC_FEATURE (29)..(29): X is K, R or H for basic amino acids
  MISC_FEATURE (30)..(30): X is T or S
  MISC_FEATURE (31)..(31): X is F or P

SEQ ID NO: 200 - protein, 35 aa, Artificial
  Completely synthesized peptide construct
DGQEEKAGVVSTGLIGGGYQQLNSERGVPNENIEN

SEQ ID NO: 201 - protein, 35 aa, Artificial; identical to SEQ ID NO: 197
  peptide construct
  MISC_FEATURE (1)..(1): X is D and E for acidic amino acids
  MISC_FEATURE (2)..(2): X is A or G
  MISC_FEATURE (3)..(3): X is N or Q for amidated amino acids
  MISC_FEATURE (4)..(4): X is D and E for acidic amino acids
  MISC_FEATURE (5)..(5): X is D and E for acidic amino acids
  MISC_FEATURE (6)..(6): X is K, R or H for basic amino acids
  MISC_FEATURE (7)..(7): X is A or G
  MISC_FEATURE (8)..(8): X is A or G
  MISC_FEATURE (9)..(9): X is I, L or V
  MISC_FEATURE (10)..(10): X is I, L or V
  MISC_FEATURE (11)..(11): X is C or S
  MISC_FEATURE (12)..(12): X is T or S
  MISC_FEATURE (13)..(13): X is A or G
  MISC_FEATURE (14)..(14): X is I, L or V
  MISC_FEATURE (15)..(15): X is I, L or V
  MISC_FEATURE (16)..(16): X is A or G
  MISC_FEATURE (17)..(17): X is A or G
  MISC_FEATURE (18)..(18): X is A or G
  MISC_FEATURE (19)..(19): X is F, W or Y for aromatic amino acids
  MISC_FEATURE (20)..(20): X is N or Q for amidated amino acids
  MISC_FEATURE (21)..(21): X is N or Q for amidated amino acids
  MISC_FEATURE (22)..(22): X is I, L or V
  MISC_FEATURE (23)..(23): X is N or Q for amidated amino acids
  MISC_FEATURE (24)..(24): X is C or S
  MISC_FEATURE (25)..(25): X is D and E for acidic amino acids
  MISC_FEATURE (26)..(26): X is K, R or H for basic amino acids
  MISC_FEATURE (27)..(27): X is A or G
  MISC_FEATURE (28)..(28): X is I, L or V
  MISC_FEATURE (29)..(29): X is F or P
  MISC_FEATURE (30)..(30): X is N or Q for amidated amino acids
  MISC_FEATURE (31)..(31): X is D and E for acidic amino acids
  MISC_FEATURE (32)..(32): X is N or Q for amidated amino acids
  MISC_FEATURE (33)..(33): X is I, L or V
  MISC_FEATURE (34)..(34): X is D and E for acidic amino acids
  MISC_FEATURE (35)..(35): X is N or Q for amidated amino acids

SEQ ID NO: 202 - protein, 31 aa, Artificial
  Completely synthesized peptide construct
DGQEEKAGVVSTGLIGGGVFIKRVSNVIIHG

SEQ ID NO: 203 - protein, 31 aa, Artificial; identical to SEQ ID NO: 123
  peptide construct
  MISC_FEATURE (1)..(1): X is D and E for acidic amino acids
  MISC_FEATURE (2)..(2): X is A or G
  MISC_FEATURE (3)..(3): X is N or Q for amidated amino acids
  MISC_FEATURE (4)..(4): X is D and E for acidic amino acids
  MISC_FEATURE (5)..(5): X is D and E for acidic amino acids
  MISC_FEATURE (6)..(6): X is K, R or H for basic amino acids
  MISC_FEATURE (7)..(7): X is A or G
  MISC_FEATURE (8)..(8): X is A or G
  MISC_FEATURE (9)..(9): X is I, L or V
  MISC_FEATURE (10)..(10): X is I, L or V
  MISC_FEATURE (11)..(11): X is C or S
  MISC_FEATURE (12)..(12): X is T or S
  MISC_FEATURE (13)..(13): X is A or G
  MISC_FEATURE (14)..(14): X is I, L or V
  MISC_FEATURE (15)..(15): X is I, L or V
  MISC_FEATURE (16)..(16): X is A or G
  MISC_FEATURE (17)..(17): X is A or G
  MISC_FEATURE (18)..(18): X is A or G
  MISC_FEATURE (19)..(19): X is I, L or V
  MISC_FEATURE (20)..(20): X is F, W or Y for aromatic amino acids
  MISC_FEATURE (21)..(21): X is I, L or V
  MISC_FEATURE (22)..(22): X is K, R or H for basic amino acids
  MISC_FEATURE (23)..(23): X is K, R or H for basic amino acids
  MISC_FEATURE (24)..(24): X is I, L or V
  MISC_FEATURE (25)..(25): X is C or S
  MISC_FEATURE (26)..(26): X is N or Q for amidated amino acids
  MISC_FEATURE (27)..(27): X is I, L or V
  MISC_FEATURE (28)..(28): X is I, L or V
  MISC_FEATURE (29)..(29): X is I, L or V
  MISC_FEATURE (30)..(30): X is K, R or H for basic amino acids
  MISC_FEATURE (31)..(31): X is A or G

SEQ ID NO: 204 - protein, 33 aa, Artificial
  Completely synthesized peptide construct
DGQEEKAGVVSTGLIGGGMKVTVAFNQFGPNRR

SEQ ID NO: 205 - protein, 33 aa, Artificial; identical to SEQ ID NO: 97
  peptide construct
  MISC_FEATURE (1)..(1): X is D and E for acidic amino acids
  MISC_FEATURE (2)..(2): X is A or G
  MISC_FEATURE (3)..(3): X is N or Q for amidated amino acids
  MISC_FEATURE (4)..(4): X is D and E for acidic amino acids
  MISC_FEATURE (5)..(5): X is D and E for acidic amino acids
  MISC_FEATURE (6)..(6): X is K, R or H for basic amino acids
  MISC_FEATURE (7)..(7): X is A or G
  MISC_FEATURE (8)..(8): X is A or G
  MISC_FEATURE (9)..(9): X is I, L or V
  MISC_FEATURE (10)..(10): X is I, L or V
  MISC_FEATURE (11)..(11): X is C or S
  MISC_FEATURE (12)..(12): X is T or S
  MISC_FEATURE (13)..(13): X is A or G
  MISC_FEATURE (14)..(14): X is I, L or V
  MISC_FEATURE (15)..(15): X is I, L or V
  MISC_FEATURE (16)..(16): X is A or G
  MISC_FEATURE (17)..(17): X is A or G
  MISC_FEATURE (18)..(18): X is A or G
  MISC_FEATURE (19)..(19): X is M or Nle
  MISC_FEATURE (20)..(20): X is K, R or H for basic amino acids
  MISC_FEATURE (21)..(21): X is I, L or V
  MISC_FEATURE (22)..(22): X is T or S
  MISC_FEATURE (23)..(23): X is I, L or V
  MISC_FEATURE (24)..(24): X is A or G
  MISC_FEATURE (25)..(25): X is F, W or Y for aromatic amino acids
  MISC_FEATURE (26)..(26): X is N or Q for amidated amino acids
  MISC_FEATURE (27)..(27): X is N or Q for amidated amino acids
  MISC_FEATURE (28)..(28): X is F, W or Y for aromatic amino acids
  MISC_FEATURE (29)..(29): X is A or G
  MISC_FEATURE (30)..(30): X is F or P
  MISC_FEATURE (31)..(31): X is N or Q for amidated amino acids
  MISC_FEATURE (32)..(32): X is K, R or H for basic amino acids
  MISC_FEATURE (33)..(33): X is K, R or H for basic amino acids

SEQ ID NO: 206 - protein, 33 aa, Artificial
  Completely synthesized peptide construct
DGQEEKAGVVSTGLIGGGIASRRVDGIIAAYQN

SEQ ID NO: 207 - protein, 33 aa, Artificial; identical to SEQ ID NO: 97
  peptide construct
  MISC_FEATURE (1)..(1): X is D and E for acidic amino acids
  MISC_FEATURE (2)..(2): X is A or G
  MISC_FEATURE (3)..(3): X is N or Q for amidated amino acids
  MISC_FEATURE (4)..(4): X is D and E for acidic amino acids
  MISC_FEATURE (5)..(5): X is D and E for acidic amino acids
  MISC_FEATURE (6)..(6): X is K, R or H for basic amino acids
  MISC_FEATURE (7)..(7): X is A or G
  MISC_FEATURE (8)..(8): X is A or G
  MISC_FEATURE (9)..(9): X is I, L or V
  MISC_FEATURE (10)..(10): X is I, L or V
  MISC_FEATURE (11)..(11): X is C or S
  MISC_FEATURE (12)..(12): X is T or S
  MISC_FEATURE (13)..(13): X is A or G
  MISC_FEATURE (14)..(14): X is I, L or V
  MISC_FEATURE (15)..(15): X is I, L or V
  MISC_FEATURE (16)..(16): X is A or G
  MISC_FEATURE (17)..(17): X is A or G
  MISC_FEATURE (18)..(18): X is A or G
  MISC_FEATURE (19)..(19): X is I, L or V
  MISC_FEATURE (20)..(20): X is A or G
  MISC_FEATURE (21)..(21): X is C or S
  MISC_FEATURE (22)..(22): X is K, Ror H for basic amino acids
  MISC_FEATURE (23)..(23): X is K, R or H for basic amino acids
  MISC_FEATURE (24)..(24): X is I, L or V
  MISC_FEATURE (25)..(25): X is D and E for acidic amino acids
  MISC_FEATURE (26)..(26): X is A or G
  MISC_FEATURE (27)..(27): X is I, L or V
  MISC_FEATURE (28)..(28): X is I, L or V
  MISC_FEATURE (29)..(29): X is A or G
  MISC_FEATURE (30)..(30): X is A or G
  MISC_FEATURE (31)..(31): X is F, W or Y for aromatic amino acids
  MISC_FEATURE (32)..(32): X is N or Q for amidated amino acids
  MISC_FEATURE (33)..(33): X is N or Q for amidated amino acids

SEQ ID NO: 208 - protein, 38 aa, Artificial
  Completely synthesized peptide construct
DGQEEKAGVVSTGLIGGGGIDIFASKNFHLQKNTIGTG

SEQ ID NO: 209 - protein, 37 aa, Artificial; identical to SEQ ID NO: 151
  peptide construct
  MISC_FEATURE (1)..(1): X is D and E for acidic amino acids
  MISC_FEATURE (2)..(2): X is A or G
  MISC_FEATURE (3)..(3): X is N or Q for amidated amino acids
  MISC_FEATURE (4)..(4): X is D and E for acidic amino acids
  MISC_FEATURE (5)..(5): X is D and E for acidic amino acids
  MISC_FEATURE (6)..(6): X is K, R or H for basic amino acids
  MISC_FEATURE (7)..(7): X is A or G
  MISC_FEATURE (8)..(8): X is A or G
  MISC_FEATURE (9)..(9): X is I, L or V
  MISC_FEATURE (10)..(10): X is I, L or V
  MISC_FEATURE (11)..(11): X is C or S
  MISC_FEATURE (12)..(12): X is T or S
  MISC_FEATURE (13)..(13): X is A or G
  MISC_FEATURE (14)..(14): X is I, L or V
  MISC_FEATURE (15)..(15): X is I, L or V
  MISC_FEATURE (16)..(16): X is A or G
  MISC_FEATURE (17)..(17): X is A or G
  MISC_FEATURE (18)..(18): X is A or G
  MISC_FEATURE (19)..(19): X is I, L or V
  MISC_FEATURE (20)..(20): X is D and E for acidic amino acids
  MISC_FEATURE (21)..(21): X is I, L or V
  MISC_FEATURE (22)..(22): X is F, W or Y for aromatic amino acids
  MISC_FEATURE (23)..(23): X is A or G
  MISC_FEATURE (24)..(24): X is C or S
  MISC_FEATURE (25)..(25): X is K, R or H for basic amino acids
  MISC_FEATURE (26)..(26): X is N or Q for amidated amino acids
  MISC_FEATURE (27)..(27): X is F, W or Y for aromatic amino acids
  MISC_FEATURE (28)..(28): X is K, R or H for basic amino acids
  MISC_FEATURE (29)..(29): X is I, L or V
  MISC_FEATURE (30)..(30): X is N or Q for amidated amino acids
  MISC_FEATURE (31)..(31): X is K, R or H for basic amino acids
  MISC_FEATURE (32)..(32): X is N or Q for amidated amino acids
  MISC_FEATURE (33)..(33): X is T or S
  MISC_FEATURE (34)..(34): X is I, L or V
  MISC_FEATURE (35)..(35): X is A or G
  MISC_FEATURE (36)..(36): X is T or S
  MISC_FEATURE (37)..(37): X is A or G

SEQ ID NO: 210 - protein, 43 aa, Artificial
  Completely synthesized peptide construct
DGQEEKAGVVSTGLIGGGGIGAVLKVLTTGPALISWIKRKRQQ

SEQ ID NO: 211 - protein, 43 aa, Artificial
  peptide construct
  MISC_FEATURE (1)..(1): X is D and E for acidic amino acids
  MISC_FEATURE (2)..(2): X is A or G
  MISC_FEATURE (3)..(3): X is N or Q for amidated amino acids
  MISC_FEATURE (4)..(4): X is D and E for acidic amino acids
  MISC_FEATURE (5)..(5): X is D and E for acidic amino acids
  MISC_FEATURE (6)..(6): X is K, R or H for basic amino acids
  MISC_FEATURE (7)..(7): X is A or G
  MISC_FEATURE (8)..(8): X is A or G
  MISC_FEATURE (9)..(9): X is I, L or V
  MISC_FEATURE (10)..(10): X is I, L or V
  MISC_FEATURE (11)..(11): X is C or S
  MISC_FEATURE (12)..(12): X is T or S
  MISC_FEATURE (13)..(13): X is A or G
  MISC_FEATURE (14)..(14): X is I, L or V
  MISC_FEATURE (15)..(15): X is I, L or V
  MISC_FEATURE (16)..(16): X is A or G
  MISC_FEATURE (17)..(17): X is A or G
  MISC_FEATURE (18)..(18): X is A or G
  MISC_FEATURE (19)..(19): X is A or G
  MISC_FEATURE (20)..(20): X is I, L or V
  MISC_FEATURE (21)..(21): X is A or G
  MISC_FEATURE (22)..(22): X is A or G
  MISC_FEATURE (23)..(23): X is I, L or V
  MISC_FEATURE (24)..(24): X is I, L or V
  MISC_FEATURE (25)..(25): X is K, R or H for basic amino acids
  MISC_FEATURE (26)..(26): X is I, L or V
  MISC_FEATURE (27)..(27): X is I, L or V
  MISC_FEATURE (28)..(28): X is T or S
  MISC_FEATURE (29)..(29): X is T or S
  MISC_FEATURE (30)..(30): X is A or G
  MISC_FEATURE (31)..(31): X is F or P
  MISC_FEATURE (32)..(32): X is A or G
  MISC_FEATURE (33)..(33): X is I, L or V
  MISC_FEATURE (34)..(34): X is I, L or V
  MISC_FEATURE (35)..(35): X is C or S
  MISC_FEATURE (36)..(36): X is F, W or Y for aromatic amino acids
  MISC_FEATURE (37)..(37): X is I, L or V
  MISC_FEATURE (38)..(38): X is K, R or H for basic amino acids
  MISC_FEATURE (39)..(39): X is K, R or H for basic amino acids
  MISC_FEATURE (40)..(40): X is K, R or H for basic amino acids
  MISC_FEATURE (41)..(41): X is K, R or H for basic amino acids
  MISC_FEATURE (42)..(42): X is N or Q for amidated amino acids
  MISC_FEATURE (43)..(43): X is N or Q for amidated amino acids
XXXXXXXXXXXXXXXXXXXXXXXXXXXXXXXXXXXXXXXXXXX

SEQ ID NO: 212 - protein, 58 aa, Artificial
  Completely synthesized peptide construct
DAEFRHDSGYEVHHQKLVFFAEDVGSKNGAIIGLMVGGVVGGGDGQEEKAGVVSTGLI

SEQ ID NO: 213 - protein, 58 aa, Artificial; identical to SEQ ID NO: 135
  peptide construct
  MISC_FEATURE (1)..(1): X is D and E for acidic amino acids
  MISC_FEATURE (2)..(2): X is A or G
  MISC_FEATURE (3)..(3): X is D and E for acidic amino acids
  MISC_FEATURE (4)..(4): X is F, W or Y for aromatic amino acids
  MISC_FEATURE (5)..(5): X is K, R or H for basic amino acids
  MISC_FEATURE (6)..(6): X is K, R or H for basic amino acids
  MISC_FEATURE (7)..(7): X is D and E for acidic amino acids
  MISC_FEATURE (8)..(8): X is T or S
  MISC_FEATURE (9)..(9): X is A or G
  MISC_FEATURE (10)..(10): X is F,  W or Y for aromatic amino acids
  MISC_FEATURE (11)..(11): X is D and E for acidic amino acids
  MISC_FEATURE (12)..(12): X is I, L or V
  MISC_FEATURE (13)..(13): X is K, R or H for basic amino acids
  MISC_FEATURE (14)..(14): X is K, R or H for basic amino acids
  MISC_FEATURE (15)..(15): X is N or Q for amidated amino acids
  MISC_FEATURE (16)..(16): X is K, R or H for basic amino acids
  MISC_FEATURE (17)..(17): X is I, L or V
  MISC_FEATURE (18)..(18): X is I, L or V
  MISC_FEATURE (19)..(19): X is F, W or Y for aromatic amino acids
  MISC_FEATURE (20)..(20): X is F, W or Y for aromatic amino acids
  MISC_FEATURE (21)..(21): X is A or G
  MISC_FEATURE (22)..(22): X is D and E for acidic amino acids
  MISC_FEATURE (23)..(23): X is D and E for acidic amino acids
  MISC_FEATURE (24)..(24): X is I, L or V
  MISC_FEATURE (25)..(25): X is A or G
  MISC_FEATURE (26)..(26): X is C or S
  MISC_FEATURE (27)..(27): X is N or Q for amidated amino acids
  MISC_FEATURE (28)..(28): X is K, R or H for basic amino acids
  MISC_FEATURE (29)..(29): X is A or G
  MISC_FEATURE (30)..(30): X is A or G
  MISC_FEATURE (31)..(31): X is I, L or V
  MISC_FEATURE (32)..(32): X is I, L or V
  MISC_FEATURE (33)..(33): X is A or G
  MISC_FEATURE (34)..(34): X is I, L or V
  MISC_FEATURE (35)..(35): X is M or Nle
  MISC_FEATURE (36)..(36): X is I, L or V
  MISC_FEATURE (37)..(37): X is A or G
  MISC_FEATURE (38)..(38): X is A or G
  MISC_FEATURE (39)..(39): X is I, L or V
  MISC_FEATURE (40)..(40): X is I, L or V
  MISC_FEATURE (41)..(41): X is A and G
  MISC_FEATURE (42)..(42): X is A or G
  MISC_FEATURE (43)..(43): X is A and G
  MISC_FEATURE (44)..(44): X is D and E for acidic amino acids
  MISC_FEATURE (45)..(45): X is A and G
  MISC_FEATURE (46)..(46): X is N or Q for amidated amino acids
  MISC_FEATURE (47)..(47): X is D and E for acidic amino acids
  MISC_FEATURE (48)..(48): X is D and E for acidic amino acids
  MISC_FEATURE (49)..(49): X is K, R or H for basic amino acids
  MISC_FEATURE (50)..(50): X is A and G
  MISC_FEATURE (51)..(51): X is A and G
  MISC_FEATURE (52)..(52): X is I, L or V
  MISC_FEATURE (53)..(53): X is I, L or V
  MISC_FEATURE (54)..(54): X is C or S
  MISC_FEATURE (55)..(55): X is T or S
  MISC_FEATURE (56)..(56): X is A and G
  MISC_FEATURE (57)..(57): X is I, L or V
  MISC_FEATURE (58)..(58): X is I, L or V

SEQ ID NO: 214 - protein, 46 aa, Artificial
  Completely synthesized peptide construct
DAEFRHDSGYEVHHQKLVFFAENVGSNKGGGDGQEEKAGVVSTGLI

SEQ ID NO: 215 - protein, 46 aa, Artificial; identical to SEQ ID NO: 137
  peptide construct
  MISC_FEATURE (1)..(1): X is D and E for acidic amino acids
  MISC_FEATURE (2)..(2): X is A or G
  MISC_FEATURE (3)..(3): X is D and E for acidic amino acids
  MISC_FEATURE (4)..(4): X is F, W or Y for aromatic amino acids
  MISC_FEATURE (5)..(5): X is K, R or H for basic amino acids
  MISC_FEATURE (6)..(6): X is K, R or H for basic amino acids
  MISC_FEATURE (7)..(7): X is D and E for acidic amino acids
  MISC_FEATURE (8)..(8): X is Tor S
  MISC_FEATURE (9)..(9): X is A or G
  MISC_FEATURE (10)..(10): X is F, W or Y for aromatic amino acids
  MISC_FEATURE (11)..(11): X is D and E for acidic amino acids
  MISC_FEATURE (12)..(12): X is I, L or V
  MISC_FEATURE (13)..(13): X is K, R or H for basic amino acids
  MISC_FEATURE (14)..(14): X is K, R or H for basic amino acids
  MISC_FEATURE (15)..(15): X is N or Q for amidated amino acids
  MISC_FEATURE (16)..(16): X is K, R or H for basic amino acids
  MISC_FEATURE (17)..(17): X is I, L or V
  MISC_FEATURE (18)..(18): X is I, L or V
  MISC_FEATURE (19)..(19): X is F, W or Y for aromatic amino acids
  MISC_FEATURE (20)..(20): X is F, W or Y for aromatic amino acids
  MISC_FEATURE (21)..(21): X is A or G
  MISC_FEATURE (22)..(22): X is D and E for acidic amino acids
  MISC_FEATURE (23)..(23): X is D and E for acidic amino acids
  MISC_FEATURE (24)..(24): X is I, L or V
  MISC_FEATURE (25)..(25): X is A or G
  MISC_FEATURE (26)..(26): X is C or S
  MISC_FEATURE (27)..(27): X is N or Q for amidated amino acids
  MISC_FEATURE (28)..(28): X is K, R or H for basic amino acids
  MISC_FEATURE (29)..(29): X is A and G
  MISC_FEATURE (30)..(30): X is A or G
  MISC_FEATURE (31)..(31): X is A and G
  MISC_FEATURE (32)..(32): X is D and E for acidic amino acids
  MISC_FEATURE (33)..(33): X is A and G
  MISC_FEATURE (34)..(34): X is N or Q for amidated amino acids
  MISC_FEATURE (35)..(35): X is D and E for acidic amino acids
  MISC_FEATURE (36)..(36): X is D and E for acidic amino acids
  MISC_FEATURE (37)..(37): X is K, R or H for basic amino acids
  MISC_FEATURE (38)..(38): X is A andG
  MISC_FEATURE (39)..(39): X is A and G
  MISC_FEATURE (40)..(40): X is I, L or V
  MISC_FEATURE (41)..(41): X is I, L or V
  MISC_FEATURE (42)..(42): X is C or S
  MISC_FEATURE (43)..(43): X is T or S
  MISC_FEATURE (44)..(44): X is A or G
  MISC_FEATURE (45)..(45): X is I, L or V
  MISC_FEATURE (46)..(46): X is I, L or V

SEQ ID NO: 216 - protein, 48 aa, Artificial
  Completely synthesized peptide construct
DAEFRHDSGYEVHHQKLVFFAENVGSNKAIGGGDGQEEKAGVVSTGLI

SEQ ID NO: 217 - protein, 48 aa, Artificial; identical to SEQ ID NO: 139
  peptide construct
  MISC_FEATURE (1)..(1): X is D and E for acidic amino acids
  MISC_FEATURE (2)..(2): X is A or G
  MISC_FEATURE (3)..(3): X is D and E for acidic amino acids
  MISC_FEATURE (4)..(4): X is F, W or Y for aromatic amino acids
  MISC_FEATURE (5)..(5): X is K, R or H for basic amino acids
  MISC_FEATURE (6)..(6): X is K, R or H for basic amino acids
  MISC_FEATURE (7)..(7): X is D and E for acidic amino acids
  MISC_FEATURE (8)..(8): X is T or S
  MISC_FEATURE (9)..(9): X is A or G
  MISC_FEATURE (10)..(10): X is F, W or Y for aromatic amino acids
  MISC_FEATURE (11)..(11): X is D and E for acidic amino acids
  MISC_FEATURE (12)..(12): X is I, L or V
  MISC_FEATURE (13)..(13): X is K, R or H for basic amino acids
  MISC_FEATURE (14)..(14): X is K, R or H for basic amino acids
  MISC_FEATURE (15)..(15): X is N or Q for amidated amino acids
  MISC_FEATURE (16)..(16): X is K, R or H for basic amino acids
  MISC_FEATURE (17)..(17): X is I, L or V
  MISC_FEATURE (18)..(18): X is I, L or V
  MISC_FEATURE (19)..(19): X is F, W or Y for aromatic amino acids
  MISC_FEATURE (20)..(20): X is F, W or Y for aromatic amino acids
  MISC_FEATURE (21)..(21): X is A or G
  MISC_FEATURE (22)..(22): X is D and E for acidic amino acids
  MISC_FEATURE (23)..(23): X is D and E for acidic amino acids
  MISC_FEATURE (24)..(24): X is I, L or V
  MISC_FEATURE (25)..(25): X is A or G
  MISC_FEATURE (26)..(26): X is C or S
  MISC_FEATURE (27)..(27): X is N or Q for amidated amino acids
  MISC_FEATURE (28)..(28): X is K, R or H for basic amino acids
  MISC_FEATURE (29)..(29): X is A  or G
  MISC_FEATURE (30)..(30): X is I, L or V
  MISC_FEATURE (31)..(31): X is A and G
  MISC_FEATURE (32)..(32): X is A or G
  MISC_FEATURE (33)..(33): X is A and G
  MISC_FEATURE (34)..(34): X is D and E for acidic amino acids
  MISC_FEATURE (35)..(35): X is A and G
  MISC_FEATURE (36)..(36): X is  N or Q for amidated amino acids
  MISC_FEATURE (37)..(37): X is D and E for acidic amino acids
  MISC_FEATURE (38)..(38): X is D and E for acidic amino acids
  MISC_FEATURE (39)..(39): X is K, R or H for basic amino acids
  MISC_FEATURE (40)..(40): X is A and G
  MISC_FEATURE (41)..(41): X is A and G
  MISC_FEATURE (42)..(42): X is I, L or V
  MISC_FEATURE (43)..(43): X is I, L or V
  MISC_FEATURE (44)..(44): X is C or S
  MISC_FEATURE (45)..(45): X is T or S
  MISC_FEATURE (46)..(46): X is A or G
  MISC_FEATURE (47)..(47): X is I, L or V
  MISC_FEATURE (48)..(48): X is I, L or V

SEQ ID NO: 218 - protein, 29 aa, Artificial
  Completely synthesized peptide construct
DAEFRHDSGYEGGGDGQEEKAGVVSTGLI

SEQ ID NO: 219 - protein, 29 aa, Artificial
  peptide construct
  MISC_FEATURE (1)..(1): X is D and E for acidic amino acids
  MISC_FEATURE (2)..(2): X is A or G
  MISC_FEATURE (3)..(3): X is D and E for acidic amino acids
  MISC_FEATURE (4)..(4): X is F, W or Y for aromatic amino acids
  MISC_FEATURE (5)..(5): X is K, R or H for basic amino acids
  MISC_FEATURE (6)..(6): X is K, R or H for basic amino acids
  MISC_FEATURE (7)..(7): X is D and E for acidic amino acids
  MISC_FEATURE (8)..(8): X is T or S
  MISC_FEATURE (9)..(9): X is A or G
  MISC_FEATURE (10)..(10): X is F, W or Y for aromatic amino acids
  MISC_FEATURE (11)..(11): X is D and E for acidic amino acids
  MISC_FEATURE (12)..(12): X is A and G
  MISC_FEATURE (13)..(13): X is A or G
  MISC_FEATURE (14)..(14): X is A and G
  MISC_FEATURE (15)..(15): X is D and E for acidic amino acids
  MISC_FEATURE (16)..(16): X is A and G
  MISC_FEATURE (17)..(17): X is N or Q for amidated amino acids
  MISC_FEATURE (18)..(18): X is D and E for acidic amino acids
  MISC_FEATURE (19)..(19): X is D and E for acidic amino acids
  MISC_FEATURE (20)..(20): X is K, R or H for basic amino acids
  MISC_FEATURE (21)..(21): X is A and G
  MISC_FEATURE (22)..(22): X is A and G
  MISC_FEATURE (23)..(23): X is I, L or V
  MISC_FEATURE (24)..(24): X is I, L or V
  MISC_FEATURE (25)..(25): X is C or S
  MISC_FEATURE (26)..(26): X is T or S
  MISC_FEATURE (27)..(27): X is A or G
  MISC_FEATURE (28)..(28): X is I, L or V
  MISC_FEATURE (29)..(29): X is I, L or V
XXXXXXXXXXXXXXXXXXXXXXXXXXXXX

SEQ ID NO: 220 - protein, 25 aa, Artificial
  Completely synthesized peptide construct
EVNGSNKGGGDGQEEKAGVVSTGLI

SEQ ID NO: 221 - protein, 25 aa, Artificial
  peptide construct
  MISC_FEATURE (1)..(1): X is Dand E for acidic amino acids
  MISC_FEATURE (2)..(2): X is Dand E for acidic amino acids
  MISC_FEATURE (3)..(3): X is I, L or V
  MISC_FEATURE (4)..(4): X is A or G
  MISC_FEATURE (5)..(5): X is C or S
  MISC_FEATURE (6)..(6): X is N or Q for amidated amino acids
  MISC_FEATURE (7)..(7): X is K, R or H for basic amino acids
  MISC_FEATURE (8)..(8): X is A and G
  MISC_FEATURE (9)..(9): X is A or G
  MISC_FEATURE (10)..(10): X is A and G
  MISC_FEATURE (11)..(11): X is D and E for acidic amino acids
  MISC_FEATURE (12)..(12): X is A and G
  MISC_FEATURE (13)..(13): X is N or Q for amidated amino acids
  MISC_FEATURE (14)..(14): X is D andE for acidic amino acids
  MISC_FEATURE (15)..(15): X is D and E for acidic amino acids
  MISC_FEATURE (16)..(16): X is K, R or H for basic amino acids
  MISC_FEATURE (17)..(17): X is A and G
  MISC_FEATURE (18)..(18): X is A and G
  MISC_FEATURE (19)..(19): X is I, L or V
  MISC_FEATURE (20)..(20): X is I, L or V
  MISC_FEATURE (21)..(21): X is C or S
  MISC_FEATURE (22)..(22): X is T or S
  MISC_FEATURE (23)..(23): X is A  or G
  MISC_FEATURE (24)..(24): X is I, L or V
  MISC_FEATURE (25)..(25): X is I, L or V
XXXXXXXXXXXXXXXXXXXXXXXXX

SEQ ID NO: 222 - protein, 30 aa, Artificial
  Completely synthesized peptide construct
DAEFRHDSGYEVGGGDGQEEKAGVVSTGLI

SEQ ID NO: 223 - protein, 30 aa, Artificial; identical to SEQ ID NO: 56
  peptide construct
  MISC_FEATURE (1)..(1): X is D and E for acidic amino acids
  MISC_FEATURE (2)..(2): X is A or G
  MISC_FEATURE (3)..(3): X is D and E for acidic amino acids
  MISC_FEATURE (4)..(4): X is F, W or Y for aromatic amino acids
  MISC_FEATURE (5)..(5): X is K, R or H for basic amino acids
  MISC_FEATURE (6)..(6): X is K, R or H for basic amino acids
  MISC_FEATURE (7)..(7): X is D and E for acidic amino acids
  MISC_FEATURE (8)..(8): X is T or S
  MISC_FEATURE (9)..(9): X is A or G
  MISC_FEATURE (10)..(10): X is F, W or Y for aromatic amino acids
  MISC_FEATURE (11)..(11): X is D and E for acidic amino acids
  MISC_FEATURE (12)..(12): X is I, L or V
  MISC_FEATURE (13)..(13): X is A and G
  MISC_FEATURE (14)..(14): X is A or G
  MISC_FEATURE (15)..(15): X is A and G
  MISC_FEATURE (16)..(16): X is D and E for acidic amino acids
  MISC_FEATURE (17)..(17): X is A and G
  MISC_FEATURE (18)..(18): X is N or Q for amidated amino acids
  MISC_FEATURE (19)..(19): X is D and E for acidic amino acids
  MISC_FEATURE (20)..(20): X is D and E for acidic amino acids
  MISC_FEATURE (21)..(21): X is K, R or H for basic amino acids
  MISC_FEATURE (22)..(22): X is A and G
  MISC_FEATURE (23)..(23): X is A and G
  MISC_FEATURE (24)..(24): X is I, L or V
  MISC_FEATURE (25)..(25): X is I, L or V
  MISC_FEATURE (26)..(26): X is C or S
  MISC_FEATURE (27)..(27): X is T or S
  MISC_FEATURE (28)..(28): X is A or G
  MISC_FEATURE (29)..(29): X is I, L or V
  MISC_FEATURE (30)..(30): X is I, L or V

SEQ ID NO: 224 - protein, 28 aa, Artificial
  Completely synthesized peptide construct
DAEFRHDSGYGGGDGQEEKAGVVSTGLI

SEQ ID NO: 225 - protein, 28 aa, Artificial
  peptide construct
  MISC_FEATURE (1)..(1): X is D and E for acidic amino acids
  MISC_FEATURE (2)..(2): X is A or G
  MISC_FEATURE (3)..(3): X is D and E for acidic amino acids
  MISC_FEATURE (4)..(4): X is F, W or Y for aromatic amino acids
  MISC_FEATURE (5)..(5): X is K, R or H for basic amino acids
  MISC_FEATURE (6)..(6): X is K, R or H for basic amino acids
  MISC_FEATURE (7)..(7): X is D and E for acidic amino acids
  MISC_FEATURE (8)..(8): X is  T or S
  MISC_FEATURE (9)..(9): X is A or G
  MISC_FEATURE (10)..(10): X is F, W or Y for aromatic amino acids
  MISC_FEATURE (11)..(11): X is A and G
  MISC_FEATURE (12)..(12): X is A or G
  MISC_FEATURE (13)..(13): X is A and G
  MISC_FEATURE (14)..(14): X is D and E for acidic amino acids
  MISC_FEATURE (15)..(15): X is A and G
  MISC_FEATURE (16)..(16): X is N or Q for amidated amino acids
  MISC_FEATURE (17)..(17): X is D and E for acidic amino acids
  MISC_FEATURE (18)..(18): X is D and E for acidic amino acids
  MISC_FEATURE (19)..(19): X is K, R or H for basic amino acids
  MISC_FEATURE (20)..(20): X is A and G
  MISC_FEATURE (21)..(21): X is A and G
  MISC_FEATURE (22)..(22): X is I, L or V
  MISC_FEATURE (23)..(23): X is I, L or V
  MISC_FEATURE (24)..(24): X is C or S
  MISC_FEATURE (25)..(25): X is T or S
  MISC_FEATURE (26)..(26): X is A or G
  MISC_FEATURE (27)..(27): X is I, L or V
  MISC_FEATURE (28)..(28): X is I, L or V
XXXXXXXXXXXXXXXXXXXXXXXXXXXX

SEQ ID NO: 226 - protein, 22 aa, Artificial
  Completely synthesized peptide construct
EFRHGGGDGQEEKAGVVSTGLI

SEQ ID NO: 227 - protein, 22 aa, Artificial
  peptide construct
  MISC_FEATURE (1)..(1): X is D and E for acidic amino acids
  MISC_FEATURE (2)..(2): X is F or  P
  MISC_FEATURE (3)..(3): X is K, R or H for basic amino acids
  MISC_FEATURE (4)..(4): X is K, R or H for basic amino acids
  MISC_FEATURE (5)..(5): X is A and G
  MISC_FEATURE (6)..(6): X is A or G
  MISC_FEATURE (7)..(7): X is A and G
  MISC_FEATURE (8)..(8): X is D and E for acidic amino acids
  MISC_FEATURE (9)..(9): X is A and G
  MISC_FEATURE (10)..(10): X is N or Q for amidated amino acids
  MISC_FEATURE (11)..(11): X is D and E for acidic amino acids
  MISC_FEATURE (12)..(12): X is D and E for acidic amino acids
  MISC_FEATURE (13)..(13): X is K, R or H for basic amino acids
  MISC_FEATURE (14)..(14): X is A and G
  MISC_FEATURE (15)..(15): X is A and G
  MISC_FEATURE (16)..(16): X is I, L or V
  MISC_FEATURE (17)..(17): X is I, L or V
  MISC_FEATURE (18)..(18): X is C or S
  MISC_FEATURE (19)..(19): X is T or S
  MISC_FEATURE (20)..(20): X is A or G
  MISC_FEATURE (21)..(21): X is I, L or V
  MISC_FEATURE (22)..(22): X is I, L or V
XXXXXXXXXXXXXXXXXXXXXX

SEQ ID NO: 228 - protein, 37 aa, Artificial
  Completely synthesized peptide construct
DSAFDVLSFTAEEKAGVYKGGGDGQEEKAGVVSTGLI

SEQ ID NO: 229 - protein, 37 aa, Artificial; identical to SEQ ID NO: 151
  peptide construct
  MISC_FEATURE (1)..(1): X is D and E for acidic amino acids
  MISC_FEATURE (2)..(2): X is C or S
  MISC_FEATURE (3)..(3): X is A or G
  MISC_FEATURE (4)..(4): X is F, W or Y for aromatic amino acids
  MISC_FEATURE (5)..(5): X is D and E for acidic amino acids
  MISC_FEATURE (6)..(6): X is I, L or V
  MISC_FEATURE (7)..(7): X is I, L or V
  MISC_FEATURE (8)..(8): X is C or S
  MISC_FEATURE (9)..(9): X is F, W or Y for aromatic amino acids
  MISC_FEATURE (10)..(10): X is T or S
  MISC_FEATURE (11)..(11): X is A or G
  MISC_FEATURE (12)..(12): X is D and E for acidic amino acids
  MISC_FEATURE (13)..(13): X is D and E for acidic amino acids
  MISC_FEATURE (14)..(14): X is K, R or H for basic amino acids
  MISC_FEATURE (15)..(15): X is A or G
  MISC_FEATURE (16)..(16): X is A or G
  MISC_FEATURE (17)..(17): X is I, L or V
  MISC_FEATURE (18)..(18): X is F, W or Y for aromatic amino acids
  MISC_FEATURE (19)..(19): X is K, R or H for basic amino acids
  MISC_FEATURE (20)..(20): X is A and G
  MISC_FEATURE (21)..(21): X is A or G
  MISC_FEATURE (22)..(22): X is A and G
  MISC_FEATURE (23)..(23): X is D and E for acidic amino acids
  MISC_FEATURE (24)..(24): X is A and G
  MISC_FEATURE (25)..(25): X is N or Q for amidated amino acids
  MISC_FEATURE (26)..(26): X is D and E for acidic amino acids
  MISC_FEATURE (27)..(27): X is D andE for acidic amino acids
  MISC_FEATURE (28)..(28): X is K, R or H for basic amino acids
  MISC_FEATURE (29)..(29): X is A and G
  MISC_FEATURE (30)..(30): X is A and G
  MISC_FEATURE (31)..(31): X is I, L or V
  MISC_FEATURE (32)..(32): X is I, L or V
  MISC_FEATURE (33)..(33): X is C or S
  MISC_FEATURE (34)..(34): X is T or S
  MISC_FEATURE (35)..(35): X is A or G
  MISC_FEATURE (36)..(36): X is I, L or V
  MISC_FEATURE (37)..(37): X is I, L or V

SEQ ID NO: 230 - protein, 32 aa, Artificial Sequence
  Completely synthesized peptide construct
SLKLMATLFSTYASGGGDGQEEKAGVVSTGLI

SEQ ID NO: 231 - protein, 32 aa, Artificial; identical to SEQ ID NO: 153
  peptide construct
  MISC_FEATURE (1)..(1): X is C or S
  MISC_FEATURE (2)..(2): X is I, L or V
  MISC_FEATURE (3)..(3): X is K, R or H for basic amino acids
  MISC_FEATURE (4)..(4): X is I, L or V
  MISC_FEATURE (5)..(5): X is M or Nle
  MISC_FEATURE (6)..(6): X is A or G
  MISC_FEATURE (7)..(7): X is T or S
  MISC_FEATURE (8)..(8): X is I, L or V
  MISC_FEATURE (9)..(9): X is F or P
  MISC_FEATURE (10)..(10): X is C or S
  MISC_FEATURE (11)..(11): X is T or S
  MISC_FEATURE (12)..(12): X is F, W or Y for aromatic amino acids
  MISC_FEATURE (13)..(13): X is A or G
  MISC_FEATURE (14)..(14): X is C or S
  MISC_FEATURE (15)..(15): X is A and G
  MISC_FEATURE (16)..(16): X is A or G
  MISC_FEATURE (17)..(17): X is A and G
  MISC_FEATURE (18)..(18): X is D and E for acidic amino acids
  MISC_FEATURE (19)..(19): X is A and G
  MISC_FEATURE (20)..(20): X is N or Q for amidated amino acids
  MISC_FEATURE (21)..(21): X is D and E for acidic amino acids
  MISC_FEATURE (22)..(22): X is D and E for acidic amino acids
  MISC_FEATURE (23)..(23): X is K, R or H for basic amino acids
  MISC_FEATURE (24)..(24): X is A and G
  MISC_FEATURE (25)..(25): X is A and G
  MISC_FEATURE (26)..(26): X is I, L or V
  MISC_FEATURE (27)..(27): X is I, L or V
  MISC_FEATURE (28)..(28): X is C or S
  MISC_FEATURE (29)..(29): X is T or S
  MISC_FEATURE (30)..(30): X is A and G
  MISC_FEATURE (31)..(31): X is I, L or V
  MISC_FEATURE (32)..(32): X is I, L or V

SEQ ID NO: 232 - protein, 32 aa, Artificial Sequence
  Completely synthesized peptide construct
SLKLMATLFSSYATGGGDGQEEKAGVVSTGLI

SEQ ID NO: 233 - protein, 32 aa, Artificial; identical to SEQ ID NO: 153
  peptide construct
  MISC_FEATURE (1)..(1): X is C or S
  MISC_FEATURE (2)..(2): X is I, L or V
  MISC_FEATURE (3)..(3): X is K, R or H for basic amino acids
  MISC_FEATURE (4)..(4): X is I, L or V
  MISC_FEATURE (5)..(5): X is M or Nle
  MISC_FEATURE (6)..(6): X is A or G
  MISC_FEATURE (7)..(7): X is T or S
  MISC_FEATURE (8)..(8): X is I, L or V
  MISC_FEATURE (9)..(9): X is F or P
  MISC_FEATURE (10)..(10): X is C or S
  MISC_FEATURE (11)..(11): X is C or S
  MISC_FEATURE (12)..(12): X is F, W or  Y for aromatic amino acids
  MISC_FEATURE (13)..(13): X is A or G
  MISC_FEATURE (14)..(14): X is T or S
  MISC_FEATURE (15)..(15): X is A and G
  MISC_FEATURE (16)..(16): X is A and G
  MISC_FEATURE (17)..(17): X is A or G
  MISC_FEATURE (18)..(18): X is D and E for acidic amino acids
  MISC_FEATURE (19)..(19): X is A and G
  MISC_FEATURE (20)..(20): X is N or Q for amidated amino acids
  MISC_FEATURE (21)..(21): X is D and E for acidic amino acids
  MISC_FEATURE (22)..(22): X is D and E for acidic amino acids
  MISC_FEATURE (23)..(23): X is K, R or H for basic amino acids
  MISC_FEATURE (24)..(24): X is A and G
  MISC_FEATURE (25)..(25): X is A and G
  MISC_FEATURE (26)..(26): X is I, L or V
  MISC_FEATURE (27)..(27): X is I, L or V
  MISC_FEATURE (28)..(28): X is C or S
  MISC_FEATURE (29)..(29): X is T or S
  MISC_FEATURE (30)..(30): X is A and G
  MISC_FEATURE (31)..(31): X is I, L or V
  MISC_FEATURE (32)..(32): X is I, L or V

SEQ ID NO: 234 - protein, 30 aa, Artificial
  Completely synthesized peptide construct
NITEAIADLTQKGGGDGQEEKAGVVSTGLI

SEQ ID NO: 235 - protein, 29 aa, Artificial
  peptide construct
  MISC_FEATURE (1)..(1): X is N or Q for amidated amino acids
  MISC_FEATURE (2)..(2): X is I, L or V
  MISC_FEATURE (3)..(3): X is T or S
  MISC_FEATURE (4)..(4): X is D and E for acidic amino acids
  MISC_FEATURE (5)..(5): X is I, L or V
  MISC_FEATURE (6)..(6): X is A or G
  MISC_FEATURE (7)..(7): X is D and E for acidic amino acids
  MISC_FEATURE (8)..(8): X is I, L or V
  MISC_FEATURE (9)..(9): X is  T or S
  MISC_FEATURE (10)..(10): X is N or Q for amidated amino acids
  MISC_FEATURE (11)..(11): X is K, R or H for basic amino acids
  MISC_FEATURE (12)..(12): X is A and G
  MISC_FEATURE (13)..(13): X is A or G
  MISC_FEATURE (14)..(14): X is A and G
  MISC_FEATURE (15)..(15): X is D and E for acidic amino acids
  MISC_FEATURE (16)..(16): X is A and G
  MISC_FEATURE (17)..(17): X is N or Q for amidated amino acids
  MISC_FEATURE (18)..(18): X is D and E for acidic amino acids
  MISC_FEATURE (19)..(19): X is D and E for acidic amino acids
  MISC_FEATURE (20)..(20): X is K, R or H for basic amino acids
  MISC_FEATURE (21)..(21): X is A and G
  MISC_FEATURE (22)..(22): X is A and G
  MISC_FEATURE (23)..(23): X is I, L or V
  MISC_FEATURE (24)..(24): X is I, L or V
  MISC_FEATURE (25)..(25): X is C or S
  MISC_FEATURE (26)..(26): X is T or S
  MISC_FEATURE (27)..(27): X is A and G
  MISC_FEATURE (28)..(28): X is I, L or V
  MISC_FEATURE (29)..(29): X is I, L or V
XXXXXXXXXXXXXXXXXXXXXXXXXXXXX

SEQ ID NO: 236 - protein, 58 aa, Artificial
  Completely synthesized peptide construct
NMYAMMIARFKMFPEVKEKGMAALPRLIAFTSEHSHFSLKGGGDGQEEKAGVVSTGLI

SEQ ID NO: 237 - protein, 58 aa, Artificial; identical to SEQ ID NO: 135
  peptide construct
  MISC_FEATURE (1)..(1): X is N or Q for amidated amino acids
  MISC_FEATURE (2)..(2): X is M or Nle
  MISC_FEATURE (3)..(3): X is F, W or Y for aromatic amino acids
  MISC_FEATURE (4)..(4): X is A or G
  MISC_FEATURE (5)..(5): X is M or Nle
  MISC_FEATURE (6)..(6): Xis M or Nle
  MISC_FEATURE (7)..(7): X is I, L or V
  MISC_FEATURE (8)..(8): X is A or G
  MISC_FEATURE (9)..(9): X is K, R or H for basic amino acids
  MISC_FEATURE (10)..(10): X is F, W or Y for aromatic amino acids
  MISC_FEATURE (11)..(11): X is K, R or H for basic amino acids
  MISC_FEATURE (12)..(12): X is M or Nle
  MISC_FEATURE (13)..(13): X is F, W or Y for aromatic amino acids
  MISC_FEATURE (14)..(14): X is F or P
  MISC_FEATURE (15)..(15): X is D and E for acidic amino acids
  MISC_FEATURE (16)..(16): X is I, L or V
  MISC_FEATURE (17)..(17): X is K, R or H for basic amino acids
  MISC_FEATURE (18)..(18): X is D and E for acidic amino acids
  MISC_FEATURE (19)..(19): X is K, R or H for basic amino acids
  MISC_FEATURE (20)..(20): X is A or G
  MISC_FEATURE (21)..(21): X is M or Nle
  MISC_FEATURE (22)..(22): X is A or G
  MISC_FEATURE (23)..(23): X is A or G
  MISC_FEATURE (24)..(24): X is I, L or V
  MISC_FEATURE (25)..(25): X is F or P
  MISC_FEATURE (26)..(26): X is K, R or H for basic amino acids
  MISC_FEATURE (27)..(27): X is I, L or V
  MISC_FEATURE (28)..(28): X is I, L or V
  MISC_FEATURE (29)..(29): X is A or G
  MISC_FEATURE (30)..(30): X is F, W or  Y for aromatic amino acids
  MISC_FEATURE (31)..(31): X is T or S
  MISC_FEATURE (32)..(32): X is C or S
  MISC_FEATURE (33)..(33): X is D and E for acidic amino acids
  MISC_FEATURE (34)..(34): X is K, R or H for basic amino acids
  MISC_FEATURE (35)..(35): X is C or S
  MISC_FEATURE (36)..(36): X is K, R or H for basic amino acids
  MISC_FEATURE (37)..(37): X is F, W or Y aromatic amino acids
  MISC_FEATURE (38)..(38): X is C or S
  MISC_FEATURE (39)..(39): X is I, L or V
  MISC_FEATURE (40)..(40): X is K, R or H for basic amino acids
  MISC_FEATURE (41)..(41): X is A and G
  MISC_FEATURE (42)..(42): X is A or G
  MISC_FEATURE (43)..(43): X is A and G
  MISC_FEATURE (44)..(44): X is D and E for acidic amino acids
  MISC_FEATURE (45)..(45): X is A and G
  MISC_FEATURE (46)..(46): X is N or Q for amidated amino acids
  MISC_FEATURE (47)..(47): X is D and E for acidic amino acids
  MISC_FEATURE (48)..(48): X is D and E for acidic amino acids
  MISC_FEATURE (49)..(49): X is K, R or H for basic amino acids
  MISC_FEATURE (50)..(50): X is A and G
  MISC_FEATURE (51)..(51): X is A and G
  MISC_FEATURE (52)..(52): X is I, L or V
  MISC_FEATURE (53)..(53): X is I, L or V
  MISC_FEATURE (54)..(54): X is C or S
  MISC_FEATURE (55)..(55): X is T or S
  MISC_FEATURE (56)..(56): X is A or G
  MISC_FEATURE (57)..(57): X is I, L or V
  MISC_FEATURE (58)..(58): X is I, L or V

SEQ ID NO: 238 - protein, 52 aa, Artificial
  Completely synthesized peptide construct
IARFKMFPEVKEKGMAALPRLIAFTSEHSHFSLKGGGDGQEEKAGVVSTGLI

SEQ ID NO: 239 - protein, 52 aa, Artificial; identical to SEQ ID NO: 160
  peptide construct
  MISC_FEATURE (1)..(1): X is I, L or V
  MISC_FEATURE (2)..(2): X is A or G
  MISC_FEATURE (3)..(3): X is K, R or H for basic amino acids
  MISC_FEATURE (4)..(4): X is F, W or Y for aromatic amino acids
  MISC_FEATURE (5)..(5): X is K, R or H for basic amino acids
  MISC_FEATURE (6)..(6): X is M or Nle
  MISC_FEATURE (7)..(7): X is F, W or Y for aromatic amino acids
  MISC_FEATURE (8)..(8): X is F or P
  MISC_FEATURE (9)..(9): X is D and E for acidic amino acids
  MISC_FEATURE (10)..(10): X is I, L or V
  MISC_FEATURE (11)..(11): X is K, R or H for basic amino acids
  MISC_FEATURE (12)..(12): X is D and E for acidic amino acids
  MISC_FEATURE (13)..(13): X is K, R or H for basic amino acids
  MISC_FEATURE (14)..(14): X is A or G
  MISC_FEATURE (15)..(15): X is M or Nle
  MISC_FEATURE (16)..(16): X is A or G
  MISC_FEATURE (17)..(17): X is A or G
  MISC_FEATURE (18)..(18): X is I, L or V
  MISC_FEATURE (19)..(19): X is F or P
  MISC_FEATURE (20)..(20): X is K,  R or H for basic amino acids
  MISC_FEATURE (21)..(21): X is I, L or V
  MISC_FEATURE (22)..(22): X is I, L or V
  MISC_FEATURE (23)..(23): X is A or G
  MISC_FEATURE (24)..(24): X is F, W or Y for aromatic amino acids
  MISC_FEATURE (25)..(25): X is T or S
  MISC_FEATURE (26)..(26): X is C or S
  MISC_FEATURE (27)..(27): X is D and E for acidic amino acids
  MISC_FEATURE (28)..(28): X is K, R or H for basic amino acids
  MISC_FEATURE (29)..(29): X is C or S
  MISC_FEATURE (30)..(30): X is K, R or H for basic amino acids
  MISC_FEATURE (31)..(31): X is F, W or Y for aromatic amino acids
  MISC_FEATURE (32)..(32): X is C or S
  MISC_FEATURE (33)..(33): X is I, L or V
  MISC_FEATURE (34)..(34): X is K, R or H for basic amino acids
  MISC_FEATURE (35)..(35): X is A and G
  MISC_FEATURE (36)..(36): X is A or G
  MISC_FEATURE (37)..(37): X is A and G
  MISC_FEATURE (38)..(38): X is D and E for acidic amino acids
  MISC_FEATURE (39)..(39): X is A and G
  MISC_FEATURE (40)..(40): X is N or Q for amidated amino acids
  MISC_FEATURE (41)..(41): X is  D and E for acidic amino acids
  MISC_FEATURE (42)..(42): X is D and E for acidic amino acids
  MISC_FEATURE (43)..(43): X is K, R or H for basic amino acids
  MISC_FEATURE (44)..(44): X is A and G
  MISC_FEATURE (45)..(45): X is A and G
  MISC_FEATURE (46)..(46): X is I, L or V
  MISC_FEATURE (47)..(47): X is I, L or V
  MISC_FEATURE (48)..(48): X is C or S
  MISC_FEATURE (49)..(49): X is T or S
  MISC_FEATURE (50)..(50): X is A and G
  MISC_FEATURE (51)..(51): X is I, L or V
  MISC_FEATURE (52)..(52): X is I, L or V

SEQ ID NO: 240 - protein, 37 aa, Artificial
  Completely synthesized peptide construct
SRLSKVAPVIKARMMEYGTTGGDGQEEKAGVVSTGLI

SEQ ID NO: 241 - protein, 38 aa, Artificial; identical to SEQ ID NO: 162
  peptide construct
  MISC_FEATURE (1)..(1): X is C or S
  MISC_FEATURE (2)..(2): X is K, R or H for basic amino acids
  MISC_FEATURE (3)..(3): X is I, L or V
  MISC_FEATURE (4)..(4): X is C or S
  MISC_FEATURE (5)..(5): X is K, R or H for basic amino acids
  MISC_FEATURE (6)..(6): X is I, L or V
  MISC_FEATURE (7)..(7): X is A or G
  MISC_FEATURE (8)..(8): X is F or  P
  MISC_FEATURE (9)..(9): X is I, L or V
  MISC_FEATURE (10)..(10): X is I, L or V
  MISC_FEATURE (11)..(11): X is K, R or H for basic amino acids
  MISC_FEATURE (12)..(12): X is A or  G
  MISC_FEATURE (13)..(13): X is K, R or H for basic amino acids
  MISC_FEATURE (14)..(14): X is M or Nle
  MISC_FEATURE (15)..(15): X is M or Nle
  MISC_FEATURE (16)..(16): X is D and E for acidic amino acids
  MISC_FEATURE (17)..(17): X is F, W or Y for acidic amino acids
  MISC_FEATURE (18)..(18): X is A or G
  MISC_FEATURE (19)..(19): X is T or S
  MISC_FEATURE (20)..(20): X is T or S
  MISC_FEATURE (21)..(21): X is A and G
  MISC_FEATURE (22)..(22): X is A or  G
  MISC_FEATURE (23)..(23): X is A and G
  MISC_FEATURE (24)..(24): X is D and E for acidic amino acids
  MISC_FEATURE (25)..(25): X is A and G
  MISC_FEATURE (26)..(26): X is N or Q for amidated amino acids
  MISC_FEATURE (27)..(27): X is D and E for acidic amino acids
  MISC_FEATURE (28)..(28): X is D and E for acidic amino acids
  MISC_FEATURE (29)..(29): X is K, R or H for basic amino acids
  MISC_FEATURE (30)..(30): X is A and G
  MISC_FEATURE (31)..(31): X is A and G
  MISC_FEATURE (32)..(32): X is I, L or V
  MISC_FEATURE (33)..(33): X is I, L or V
  MISC_FEATURE (34)..(34): X is C or S
  MISC_FEATURE (35)..(35): X is T or S
  MISC_FEATURE (36)..(36): X is A and G
  MISC_FEATURE (37)..(37): X is I, L or V
  MISC_FEATURE (38)..(38): X is I, L or V

SEQ ID NO: 242 - protein, 37 aa, Artificial
  Completely synthesized peptide construct
IPPSLRYLEDEERMSRLSKGGGDGQEEKAGVVSTGLI

SEQ ID NO: 243 - protein, 36 aa, Artificial; identical to SEQ ID NO: 164
  peptide construct
  MISC_FEATURE (1)..(1): X is I, L or V
  MISC_FEATURE (2)..(2): X is F or P
  MISC_FEATURE (3)..(3): X is F or P
  MISC_FEATURE (4)..(4): X is C or S
  MISC_FEATURE (5)..(5): X is I, L or V
  MISC_FEATURE (6)..(6): X is K, R or H for basic amino acids
  MISC_FEATURE (7)..(7): X is F, W or Y for aromatic amino acids
  MISC_FEATURE (8)..(8): X is D and E for acidic amino acids
  MISC_FEATURE (9)..(9): X is D and E for acidic amino acids
  MISC_FEATURE (10)..(10): X is D and E for acidic amino acids
  MISC_FEATURE (11)..(11): X is D and E for acidic amino acids
  MISC_FEATURE (12)..(12): X is K, R or H for basic amino acids
  MISC_FEATURE (13)..(13): X is M or Nle
  MISC_FEATURE (14)..(14): X is C or S
  MISC_FEATURE (15)..(15): X is K, R or H for basic amino acids
  MISC_FEATURE (16)..(16): X is I, L or V
  MISC_FEATURE (17)..(17): X is C or S
  MISC_FEATURE (18)..(18): X is K, R or H for basic amino acids
  MISC_FEATURE (19)..(19): X is A and G
  MISC_FEATURE (20)..(20): X is A or G
  MISC_FEATURE (21)..(21): X is A and G
  MISC_FEATURE (22)..(22): X is D and E for acidic amino acids
  MISC_FEATURE (23)..(23): X is A and G
  MISC_FEATURE (24)..(24): X is N or Q for amidated amino acids
  MISC_FEATURE (25)..(25): X is D and E for acidic amino acids
  MISC_FEATURE (26)..(26): X is D and E for acidic amino acids
  MISC_FEATURE (27)..(27): X is K, R or H for basic amino acids
  MISC_FEATURE (28)..(28): X is A and G
  MISC_FEATURE (29)..(29): X is A and G
  MISC_FEATURE (30)..(30): X is I, L or V
  MISC_FEATURE (31)..(31): X is I, L or V
  MISC_FEATURE (32)..(32): X is C or S
  MISC_FEATURE (33)..(33): X is T or S
  MISC_FEATURE (34)..(34): X is A or G
  MISC_FEATURE (35)..(35): X is I, L or V
  MISC_FEATURE (36)..(36): X is I, L or V

SEQ ID NO: 244 - protein, 38 aa, Artificial
  Completely synthesized peptide construct
NTNMFTYEIAPVFVLLEYVTGGGDGQEEKAGVVSTGLI

SEQ ID NO: 245 - protein, 38 aa, Artificial; identical to SEQ ID NO: 162
  peptide construct
  MISC_FEATURE (1)..(1): X is N or Q for amidated amino acids
  MISC_FEATURE (2)..(2): X is T or S
  MISC_FEATURE (3)..(3): X is N or Q for amidated amino acids
  MISC_FEATURE (4)..(4): X is M or Nle
  MISC_FEATURE (5)..(5): X is F, W or Y for aromatic amino acids
  MISC_FEATURE (6)..(6): X is T or S
  MISC_FEATURE (7)..(7): X is F, W or Y for aromatic amino acids
  MISC_FEATURE (8)..(8): X is D and E for acidic amino acids
  MISC_FEATURE (9)..(9): X is I, L or V
  MISC_FEATURE (10)..(10): X is A or G
  MISC_FEATURE (11)..(11): X is F or P
  MISC_FEATURE (12)..(12): X is I, L or V
  MISC_FEATURE (13)..(13): X is F, W or Y for aromatic amino acids
  MISC_FEATURE (14)..(14): X is I, L or V
  MISC_FEATURE (15)..(15): X is I, L or V
  MISC_FEATURE (16)..(16): X is I, L or V
  MISC_FEATURE (17)..(17): X is D and E for acidic amino acids
  MISC_FEATURE (18)..(18): X is F, W or Y for aromatic amino acids
  MISC_FEATURE (19)..(19): X is I, L or V
  MISC_FEATURE (20)..(20): X is T or S
  MISC_FEATURE (21)..(21): X is A and G
  MISC_FEATURE (22)..(22): X is A or G
  MISC_FEATURE (23)..(23): X is A and G
  MISC_FEATURE (24)..(24): X is D and E for acidic amino acids
  MISC_FEATURE (25)..(25): X is A and G
  MISC_FEATURE (26)..(26): X is N or Q for amidated amino acids
  MISC_FEATURE (27)..(27): X is D and E for acidic amino acids
  MISC_FEATURE (28)..(28): X is D and E for acidic amino acids
  MISC_FEATURE (29)..(29): X is K, R or H for basic amino acids
  MISC_FEATURE (30)..(30): X is A and G
  MISC_FEATURE (31)..(31): X is A and G
  MISC_FEATURE (32)..(32): X is I, L or V
  MISC_FEATURE (33)..(33): X is I, L or V
  MISC_FEATURE (34)..(34): X is C or S
  MISC_FEATURE (35)..(35): X is T or C
  MISC_FEATURE (36)..(36): X is A or G
  MISC_FEATURE (37)..(37): X is I, L or V
  MISC_FEATURE (38)..(38): X is I, L or V

SEQ ID NO: 246 - protein, 33 aa, Artificial
  Completely synthesized peptide construct
FKADEKKFWGKYLYEGGGDGQEEKAGVVSTGLI

SEQ ID NO: 247 - protein, 33 aa, Artificial; identical to SEQ ID NO: 97
  peptide construct
  MISC_FEATURE (1)..(1): X is F, W or Y for aromatic amino acids
  MISC_FEATURE (2)..(2): X is K, R or H for basic amino acids
  MISC_FEATURE (3)..(3): X is A or G
  MISC_FEATURE (4)..(4): X is D and E for acidic amino acids
  MISC_FEATURE (5)..(5): X is D and E for acidic amino acids
  MISC_FEATURE (6)..(6): X is K, R or H for basic amino acids
  MISC_FEATURE (7)..(7): X is K, R or H for basic amino acids
  MISC_FEATURE (8)..(8): X is F, W or Y for aromatic amino acids
  MISC_FEATURE (9)..(9): X is F, W or Y for aromatic amino acids
  MISC_FEATURE (10)..(10): X is A or G
  MISC_FEATURE (11)..(11): X is K, R or H for basic amino acids
  MISC_FEATURE (12)..(12): X is F, W or Y for aromatic amino acids
  MISC_FEATURE (13)..(13): X is I, L or V
  MISC_FEATURE (14)..(14): X is F, W or Y for aromatic amino acids
  MISC_FEATURE (15)..(15): X is D and E for acidic amino acids
  MISC_FEATURE (16)..(16): X is A and G
  MISC_FEATURE (17)..(17): X is A or G
  MISC_FEATURE (18)..(18): X is A and G
  MISC_FEATURE (19)..(19): X is D and E for acidic amino acids
  MISC_FEATURE (20)..(20): X is A and G
  MISC_FEATURE (21)..(21): X is N or Q for amidated amino acids
  MISC_FEATURE (22)..(22): X is D and E for acidic amino acids
  MISC_FEATURE (23)..(23): X is D and E for acidic amino acids
  MISC_FEATURE (24)..(24): X is K, R or H for basic amino acids
  MISC_FEATURE (25)..(25): X is A and G
  MISC_FEATURE (26)..(26): X is A and G
  MISC_FEATURE (27)..(27): X is I, L or V
  MISC_FEATURE (28)..(28): X is I, L or V
  MISC_FEATURE (29)..(29): X is C or S
  MISC_FEATURE (30)..(30): X is T or S
  misc_feature (31)..(31): Xaa can be any naturally occurring amino acid
  MISC_FEATURE (32)..(32): X is A and G
  MISC_FEATURE (32)..(32): X is I, L or V
  MISC_FEATURE (33)..(33): X is I, L or V

SEQ ID NO: 248 - protein, 33 aa, Artificial
  Completely synthesized peptide construct
SHLVEALYLVCGERGGGGDGQEEKAGVVSTGLI

SEQ ID NO: 249 - protein, 32 aa, Artificial; identical to SEQ ID NO: 153
  peptide construct
  MISC_FEATURE (1)..(1): X is C or S
  MISC_FEATURE (2)..(2): X is K, R or H for basic amino acids
  MISC_FEATURE (3)..(3): X is I, L or V
  MISC_FEATURE (4)..(4): X is I, L or V
  MISC_FEATURE (5)..(5): X is D and E for acidic amino acids
  MISC_FEATURE (6)..(6): X is A or G
  MISC_FEATURE (7)..(7): X is I, L or V
  MISC_FEATURE (8)..(8): X is F, W or Y for aromatic amino acids
  MISC_FEATURE (9)..(9): X is I, L or V
  MISC_FEATURE (10)..(10): X is C or S
  MISC_FEATURE (11)..(11): X is A or G
  MISC_FEATURE (12)..(12): X is D and E for acidic amino acids
  MISC_FEATURE (13)..(13): X is K, R or H for basic amino acids
  MISC_FEATURE (14)..(14): X is A or G
  MISC_FEATURE (15)..(15): X is A and G
  MISC_FEATURE (16)..(16): X is A or G
  MISC_FEATURE (17)..(17): X is A and G
  MISC_FEATURE (18)..(18): X is D and E for acidic amino acids
  MISC_FEATURE (19)..(19): X is A and G
  MISC_FEATURE (20)..(20): X is N or Q for amidated amino acids
  MISC_FEATURE (21)..(21): X is D and E for acidic amino acids
  MISC_FEATURE (22)..(22): X is D and E for acidic amino acids
  MISC_FEATURE (23)..(23): X is K, R or H for basic amino acids
  MISC_FEATURE (24)..(24): X is A and G
  MISC_FEATURE (25)..(25): X is A and G
  MISC_FEATURE (26)..(26): X is I, L or V
  MISC_FEATURE (27)..(27): X is I, L or V
  MISC_FEATURE (28)..(28): X is C or S
  MISC_FEATURE (29)..(29): X is T or S
  MISC_FEATURE (30)..(30): X is A and G
  MISC_FEATURE (31)..(31): X is I, L or V
  MISC_FEATURE (32)..(32): X is I, L or V

SEQ ID NO: 250 - protein, 42 aa, Artificial
  Completely synthesized peptide construct
VLGGGCALLRCIPALDSLTPANEDGGGDGQEEKAGVVSTGLI

SEQ ID NO: 251 - protein, 42 aa, Artificial; identical to SEQ ID NO: 172
  peptide construct
  MISC_FEATURE (1)..(1): X is I, L or V
  MISC_FEATURE (2)..(2): X is I, L or V
  MISC_FEATURE (3)..(3): X is A or G
  MISC_FEATURE (4)..(4): X is A or G
  MISC_FEATURE (5)..(5): X is A or G
  MISC_FEATURE (6)..(6): X is C or S
  MISC_FEATURE (7)..(7): X is A or G
  MISC_FEATURE (8)..(8): X is I, L or V
  MISC_FEATURE (9)..(9): X is I, L or V
  MISC_FEATURE (10)..(10): X is K, R or H for basic amino acids
  MISC_FEATURE (11)..(11): X is C or S
  MISC_FEATURE (12)..(12): X is I, L or V
  MISC_FEATURE (13)..(13): X is F or P
  MISC_FEATURE (14)..(14): X is A or G
  MISC_FEATURE (15)..(15): X is I, L or V
  MISC_FEATURE (16)..(16): X is D and E for acidic amino acids
  MISC_FEATURE (17)..(17): X is C or S
  MISC_FEATURE (18)..(18): X is I, L or V
  MISC_FEATURE (19)..(19): X is T or S
  MISC_FEATURE (20)..(20): X is F or P
  MISC_FEATURE (21)..(21): X is A or G
  MISC_FEATURE (22)..(22): X is N or Q for amidated amino acids
  MISC_FEATURE (23)..(23): X is D and E for acidic amino acids
  MISC_FEATURE (24)..(24): X is D and E for acidic amino acids
  MISC_FEATURE (25)..(25): X is A and G
  MISC_FEATURE (26)..(26): X is A or G
  MISC_FEATURE (27)..(27): X is A and G
  MISC_FEATURE (28)..(28): X is D and E for acidic amino acids
  MISC_FEATURE (29)..(29): X is A and G
  MISC_FEATURE (30)..(30): X is N or Q for amidated amino acids
  MISC_FEATURE (31)..(31): X is D and E for acidic amino acids
  MISC_FEATURE (32)..(32): X is D and E for acidic amino acids
  MISC_FEATURE (33)..(33): X is K, R or H for basic amino acids
  MISC_FEATURE (34)..(34): X is A and G
  MISC_FEATURE (35)..(35): X is A and G
  MISC_FEATURE (36)..(36): X is I, L or V
  MISC_FEATURE (37)..(37): X is I, L or V
  MISC_FEATURE (38)..(38): X is C or S
  MISC_FEATURE (39)..(39): X is T or S
  MISC_FEATURE (40)..(40): X is A or G
  MISC_FEATURE (41)..(41): X is I, L or V
  MISC_FEATURE (42)..(42): X is I, L or V

SEQ ID NO: 252 - protein, 46 aa, Artificial
  Completely synthesized peptide construct
EACVTSWLWSGEGAVFYRVDLHFINLGTGGGDGQEEKAGVVSTGLI

SEQ ID NO: 253 - protein, 46 aa, Artificial; identical to SEQ ID NO: 137
  peptide construct
  MISC_FEATURE (1)..(1): X is D and E for acidic amino acids
  MISC_FEATURE (2)..(2): X is  A or G
  MISC_FEATURE (3)..(3): X is C or S
  MISC_FEATURE (4)..(4): X is I, L or V
  MISC_FEATURE (5)..(5): X is T or S
  MISC_FEATURE (6)..(6): X is C or S
  MISC_FEATURE (7)..(7): X is F, W or Y for aromatic amino acids
  MISC_FEATURE (8)..(8): X is I, L or V
  MISC_FEATURE (9)..(9): X is F, W or Y for aromatic amino acids
  MISC_FEATURE (10)..(10): X is C or S
  MISC_FEATURE (11)..(11): X is A or  G
  MISC_FEATURE (12)..(12): X is D and E for acidic amino acids
  MISC_FEATURE (13)..(13): X is A or G
  MISC_FEATURE (14)..(14): X is A or G
  MISC_FEATURE (15)..(15): X is I, L or V
  MISC_FEATURE (16)..(16): X is F, W or Y for aromatic amino acids
  MISC_FEATURE (17)..(17): X is F, W or Y for aromatic amino acids
  MISC_FEATURE (18)..(18): X is K, R or H for basic amino acids
  MISC_FEATURE (19)..(19): X is I, L or V
  MISC_FEATURE (20)..(20): X is D and E for acidic amino acids
  MISC_FEATURE (21)..(21): X is I, L or V
  MISC_FEATURE (22)..(22): X is K, R or H for basic amino acids
  MISC_FEATURE (23)..(23): X is F, W or Y for aromatic amino acids
  MISC_FEATURE (24)..(24): X is I, L or V
  MISC_FEATURE (25)..(25): X is N or Q for amidated amino acids
  MISC_FEATURE (26)..(26): X is I, L or V
  MISC_FEATURE (27)..(27): X is A or G
  MISC_FEATURE (28)..(28): X is T or S
  MISC_FEATURE (29)..(29): X is A and G
  MISC_FEATURE (30)..(30): X is A or G
  MISC_FEATURE (31)..(31): X is A or G
  MISC_FEATURE (32)..(32): X is D and E for acidic amino acids
  MISC_FEATURE (33)..(33): X is A and G
  MISC_FEATURE (34)..(34): X is N or Q for amidated amino acids
  MISC_FEATURE (35)..(35): X is D and E for acidic amino acids
  MISC_FEATURE (36)..(36): X is D and E for acidic amino acids
  MISC_FEATURE (37)..(37): X is K, R or H for basic amino acids
  MISC_FEATURE (38)..(38): X is A and G
  MISC_FEATURE (39)..(39): X is A and G
  MISC_FEATURE (40)..(40): X is I, L or V
  MISC_FEATURE (41)..(41): X is I, L or V
  MISC_FEATURE (42)..(42): X is C or S
  MISC_FEATURE (43)..(43): X is T or S
  MISC_FEATURE (44)..(44): X is A and G
  MISC_FEATURE (45)..(45): X is I, L or V
  MISC_FEATURE (46)..(46): X is I, L or V

SEQ ID NO: 254 - protein, 39 aa, Artificial
  Completely synthesized peptide construct
MDFWCVEHDRPPPATPTSLTTGGGDGQEEKAGVVSTGLI

SEQ ID NO: 255 - protein, 39 aa, Artificial; identical to SEQ ID NO: 176
  peptide construct
  MISC_FEATURE (1)..(1): X is M or Nle
  MISC_FEATURE (2)..(2): X is D and E for acidic amino acids
  MISC_FEATURE (3)..(3): X is F, W or Y for aromatic amino acids
  MISC_FEATURE (4)..(4): X is F, W or Y for aromatic amino acids
  MISC_FEATURE (5)..(5): X is C or S
  MISC_FEATURE (6)..(6): X is I, L or V
  MISC_FEATURE (7)..(7): X is D and E for acidic amino acids
  MISC_FEATURE (8)..(8): X is K, R or H for basic amino acids
  MISC_FEATURE (9)..(9): X is D and E for acidic amino acids
  MISC_FEATURE (10)..(10): X is K, R or H for basic amino acids
  MISC_FEATURE (11)..(11): X is F or P
  MISC_FEATURE (12)..(12): X is F or P
  MISC_FEATURE (13)..(13): X is F or P
  MISC_FEATURE (14)..(14): X is A or G
  MISC_FEATURE (15)..(15): X is T or S
  MISC_FEATURE (16)..(16): X is F or P
  MISC_FEATURE (17)..(17): X is T or S
  MISC_FEATURE (18)..(18): X is C or S
  MISC_FEATURE (19)..(19): X is I, L or V
  MISC_FEATURE (20)..(20): X is T or S
  MISC_FEATURE (21)..(21): X is T or S
  MISC_FEATURE (22)..(22): X is A and G
  MISC_FEATURE (23)..(23): X is A or G
  MISC_FEATURE (24)..(24): X is A and G
  MISC_FEATURE (25)..(25): X is D and E for acidic amino acids
  MISC_FEATURE (26)..(26): X is A and G
  MISC_FEATURE (27)..(27): X is N or Q for amidated amino acids
  MISC_FEATURE (28)..(28): X is D and E for acidic amino acids
  MISC_FEATURE (29)..(29): X is D and E for acidic amino acids
  MISC_FEATURE (30)..(30): X is K, R or H for basic amino acids
  MISC_FEATURE (31)..(31): X is A and G
  MISC_FEATURE (32)..(32): X is A and G
  MISC_FEATURE (33)..(33): X is I, L or V
  MISC_FEATURE (34)..(34): X is I, L or V
  MISC_FEATURE (35)..(35): X is C or S
  MISC_FEATURE (36)..(36): X is T or S
  MISC_FEATURE (37)..(37): X is A and G
  MISC_FEATURE (38)..(38): X is I, L or V
  MISC_FEATURE (39)..(39): X is I, L or V

SEQ ID NO: 256 - protein, 38 aa, Artificial
  Completely synthesized peptide construct
NMYAMMIARFKMFPEVKEKGGGGDGQEEKAGVVSTGLI

SEQ ID NO: 257 - protein, 38 aa, Artificial; identical to SEQ ID NO: 162
  peptide construct
  MISC_FEATURE (1)..(1): X is N or Q for amidated amino acids
  MISC_FEATURE (2)..(2): X is M or Nle
  MISC_FEATURE (3)..(3): X is F, W or Y for aromatic amino acids
  MISC_FEATURE (4)..(4): X is A or G
  MISC_FEATURE (5)..(5): X is M or Nle
  MISC_FEATURE (6)..(6): X is M or Nle
  MISC_FEATURE (7)..(7): X is I, L or V
  MISC_FEATURE (8)..(8): X is A or G
  MISC_FEATURE (9)..(9): X is K, R or H for basic amino acids
  MISC_FEATURE (10)..(10): X is F, W or Y for aromatic amino acids
  MISC_FEATURE (11)..(11): X is K, R or H for basic amino acids
  MISC_FEATURE (12)..(12): X is M or Nle
  MISC_FEATURE (13)..(13): X is F, W or Y for aromatic amino acids
  MISC_FEATURE (14)..(14): X is F or P
  MISC_FEATURE (15)..(15): X is D and E for acidic amino acids
  MISC_FEATURE (16)..(16): X is I, L or V
  MISC_FEATURE (17)..(17): X is K, R or H for basic amino acids
  MISC_FEATURE (18)..(18): X is D and E for acidic amino acids
  MISC_FEATURE (19)..(19): X is K, R or H for basic amino acids
  MISC_FEATURE (20)..(20): X is A or G
  MISC_FEATURE (21)..(21): X is A and G
  MISC_FEATURE (22)..(22): X is A or G
  MISC_FEATURE (23)..(23): X is A and G
  MISC_FEATURE (24)..(24): X is D and E for acidic amino acids
  MISC_FEATURE (25)..(25): X is A and G
  MISC_FEATURE (26)..(26): X is N or Q for amidated amino acids
  MISC_FEATURE (27)..(27): X is D and E for acidic amino acids
  MISC_FEATURE (28)..(28): X is D and E for acidic amino acids
  MISC_FEATURE (29)..(29): X is K, R or H for basic amino acids
  MISC_FEATURE (30)..(30): X is A and G
  MISC_FEATURE (31)..(31): X is A and G
  MISC_FEATURE (32)..(32): X is I, L or V
  MISC_FEATURE (33)..(33): X is I, L or V
  MISC_FEATURE (34)..(34): X is C or S
  MISC_FEATURE (35)..(35): X is T or S
  MISC_FEATURE (36)..(36): X is A or G
  MISC_FEATURE (37)..(37): X is I, L or V
  MISC_FEATURE (38)..(38): X is I, L or V

SEQ ID NO: 258 - protein, 51 aa, Artificial
  Completely synthesized peptide construct
NMYAMMIARFKMFPEVKEKGMAALPRLIAFTSEGGGDGQEEKAGVVSTGLI

SEQ ID NO: 259 - protein, 51 aa, Artificial; identical to SEQ ID NO: 180
  peptide construct
  MISC_FEATURE (1)..(1): X is N or Q for amidated amino acids
  MISC_FEATURE (2)..(2): X is M or Nle
  MISC_FEATURE (3)..(3): X is F, W or Y for aromatic amino acids
  MISC_FEATURE (4)..(4): X is A or G
  MISC_FEATURE (5)..(5): X is M or Nle
  MISC_FEATURE (6)..(6): X is M or Nle
  MISC_FEATURE (7)..(7): X is I, L or V
  MISC_FEATURE (8)..(8): X is A or G
  MISC_FEATURE (9)..(9): X is K, R or H for basic amino acids
  MISC_FEATURE (10)..(10): X is F, W or Y for aromatic amino acids
  MISC_FEATURE (11)..(11): X is K, R or H for basic amino acids
  MISC_FEATURE (12)..(12): X is M or Nle
  MISC_FEATURE (13)..(13): X is F, W or Y for aromatic amino acids
  MISC_FEATURE (14)..(14): X is F or P
  MISC_FEATURE (15)..(15): X is D and E for acidic amino acids
  MISC_FEATURE (16)..(16): X is I, L or V
  MISC_FEATURE (17)..(17): X is K, R or H for basic amino acids
  MISC_FEATURE (18)..(18): X is D and E for acidic amino acids
  MISC_FEATURE (19)..(19): X is K, R or H for basic amino acids
  MISC_FEATURE (20)..(20): X is A or G
  MISC_FEATURE (21)..(21): X is M or Nle
  MISC_FEATURE (22)..(22): X is A or G
  MISC_FEATURE (23)..(23): X is A or G
  MISC_FEATURE (24)..(24): X is I, L or V
  MISC_FEATURE (25)..(25): X is F or P
  MISC_FEATURE (26)..(26): X is K, R or H for basic amino acids
  MISC_FEATURE (27)..(27): X is I, L or V
  MISC_FEATURE (28)..(28): X is I, L or V
  MISC_FEATURE (29)..(29): X is A or G
  MISC_FEATURE (30)..(30): X is F, W or Y for aromatic amino acids
  MISC_FEATURE (31)..(31): X is T or S
  MISC_FEATURE (32)..(32): X is C or S
  MISC_FEATURE (33)..(33): X is D and E for acidic amino acids
  MISC_FEATURE (34)..(34): X is A and G
  MISC_FEATURE (35)..(35): X is A or G
  MISC_FEATURE (36)..(36): X is A and G
  MISC_FEATURE (37)..(37): X is D and E for acidic amino acids
  MISC_FEATURE (38)..(38): X is A and G
  MISC_FEATURE (39)..(39): X is N or Q for amidated amino acids
  MISC_FEATURE (40)..(40): X is D and E for acidic amino acids
  MISC_FEATURE (41)..(41): X is D and E for acidic amino acids
  MISC_FEATURE (42)..(42): X is K, R or H for basic amino acids
  MISC_FEATURE (43)..(43): X is A and G
  MISC_FEATURE (44)..(44): X is A and G
  MISC_FEATURE (45)..(45): X is I, L or V
  MISC_FEATURE (46)..(46): X is I, L or V
  MISC_FEATURE (47)..(47): X is C or S
  MISC_FEATURE (48)..(48): X is T or S
  MISC_FEATURE (49)..(49): X is A and G
  MISC_FEATURE (50)..(50): X is I, L or V
  MISC_FEATURE (51)..(51): X is I, L or V

SEQ ID NO: 260 - protein, 31 aa, Artificial
  Completely synthesized peptide construct
IAFTSEHSHFSLKGGGDGQEEKAGVVSTGLI

SEQ ID NO: 261 - protein, 31 aa, Artificial; identical to SEQ ID NO: 123
  peptide construct
  MISC_FEATURE (1)..(1): X is I, L or V
  MISC_FEATURE (2)..(2): X is A or G
  MISC_FEATURE (3)..(3): X is F, W or Y for aromatic amino acids
  MISC_FEATURE (4)..(4): X is T or S
  MISC_FEATURE (5)..(5): X is C or S
  MISC_FEATURE (6)..(6): X is D and E for acidic amino acids
  MISC_FEATURE (7)..(7): X is K, R or H for basic amino acids
  MISC_FEATURE (8)..(8): X is C or S
  MISC_FEATURE (9)..(9): X is K, R or H for basic amino acids
  MISC_FEATURE (10)..(10): X is F, W or Y for aromatic amino acids
  MISC_FEATURE (11)..(11): X is C or S
  MISC_FEATURE (12)..(12): X is I, L or V
  MISC_FEATURE (13)..(13): X is K, R or H for basic amino acids
  MISC_FEATURE (14)..(14): X is A and G
  MISC_FEATURE (15)..(15): X is A or G
  MISC_FEATURE (16)..(16): X is A and G
  MISC_FEATURE (17)..(17): X is D and E for acidic amino acids
  MISC_FEATURE (18)..(18): X is A and G
  MISC_FEATURE (19)..(19): X is N or Q for amidated amino acids
  MISC_FEATURE (20)..(20): X is D or E for acidic amino acids
  MISC_FEATURE (21)..(21): X is D and E for acidic amino acids
  MISC_FEATURE (22)..(22): X is K, R or H for basic amino acids
  MISC_FEATURE (23)..(23): X is A and G
  MISC_FEATURE (24)..(24): X is A and G
  MISC_FEATURE (25)..(25): X is I, L or V
  MISC_FEATURE (26)..(26): X is I, L or V
  MISC_FEATURE (27)..(27): X is C or S
  MISC_FEATURE (28)..(28): X is T or S
  MISC_FEATURE (29)..(29): X is A or G
  MISC_FEATURE (30)..(30): X is I, L or V
  MISC_FEATURE (31)..(31): X is I, L or V

SEQ ID NO: 262 - protein, 39 aa, Artificial; identical to SEQ ID NO: 176
  peptide construct
  MISC_FEATURE (1)..(1): X is M or Nle
  MISC_FEATURE (2)..(2): X is D and E for acidic amino acids
  MISC_FEATURE (3)..(3): X is F, W or Y for aromatic amino acids
  MISC_FEATURE (4)..(4): X is F, W or Y for aromatic amino acids
  MISC_FEATURE (5)..(5): X is C or S
  MISC_FEATURE (6)..(6): X is I, L or V
  MISC_FEATURE (7)..(7): X is D and E for acidic amino acids
  MISC_FEATURE (8)..(8): X is K, R or H for basic amino acids
  MISC_FEATURE (9)..(9): X is D and E for acidic amino acids
  MISC_FEATURE (10)..(10): X is K, R or H for basic amino acids
  MISC_FEATURE (11)..(11): X is F or P
  MISC_FEATURE (12)..(12): X is F or P
  MISC_FEATURE (13)..(13): X is F or P
  MISC_FEATURE (14)..(14): X is A or G
  MISC_FEATURE (15)..(15): X is T or S
  MISC_FEATURE (16)..(16): X is F or P
  MISC_FEATURE (17)..(17): X is T or S
  MISC_FEATURE (18)..(18): X is C or S
  MISC_FEATURE (19)..(19): X is I, L or V
  MISC_FEATURE (20)..(20): X is T or S
  MISC_FEATURE (21)..(21): X is T or S
  MISC_FEATURE (22)..(22): X is A and G
  MISC_FEATURE (23)..(23): X is A or G
  MISC_FEATURE (24)..(24): X is A and G
  MISC_FEATURE (25)..(25): X is D and E for acidic amino acids
  MISC_FEATURE (26)..(26): X is A and G
  MISC_FEATURE (27)..(27): X is N or Q for amidated amino acids
  MISC_FEATURE (28)..(28): X is D and E for acidic amino acids
  MISC_FEATURE (29)..(29): X is D and E for acidic amino acids
  MISC_FEATURE (30)..(30): X is K, R or H for basic amino acids
  MISC_FEATURE (31)..(31): X is A and G
  MISC_FEATURE (32)..(32): X is A and G
  MISC_FEATURE (33)..(33): X is I, l or V
  MISC_FEATURE (34)..(34): X is I, L or V
  MISC_FEATURE (35)..(35): X is C or S
  MISC_FEATURE (36)..(36): X is T or S
  MISC_FEATURE (37)..(37): X is A and G
  MISC_FEATURE (38)..(38): X is I, L or V
  MISC_FEATURE (39)..(39): X is I, L or V

SEQ ID NO: 263 - protein, 28 aa, Artificial
  Completely synthesized peptide construct
ERPTLAFLQDGGGDGQEEKAGVVSTGLI

SEQ ID NO: 264 - protein, 28 aa, Artificial
  peptide construct
  MISC_FEATURE (1)..(1): X is D and E for acidic amino acids
  MISC_FEATURE (2)..(2): X is K, R or H for basic amino acids
  MISC_FEATURE (3)..(3): X is F or P
  MISC_FEATURE (4)..(4): X is T or S
  MISC_FEATURE (5)..(5): X is I, L or V
  MISC_FEATURE (6)..(6): X is A or G
  MISC_FEATURE (7)..(7): X is F, W or Y for aromatic amino acids
  MISC_FEATURE (8)..(8): X is I, L or V
  MISC_FEATURE (9)..(9): X is N or Q for amidated amino acids
  MISC_FEATURE (10)..(10): X is D and E for acidic amino acids
  MISC_FEATURE (11)..(11): X is A and G
  MISC_FEATURE (12)..(12): X is A or G
  MISC_FEATURE (13)..(13): X is A and G
  MISC_FEATURE (14)..(14): X is D and E for acidic amino acids
  MISC_FEATURE (15)..(15): X is A and G
  MISC_FEATURE (16)..(16): X is N or Q for amidated amino acids
  MISC_FEATURE (17)..(17): X is D and E for acidic amino acids
  MISC_FEATURE (18)..(18): X is D and E for acidic amino acids
  MISC_FEATURE (19)..(19): X is K, R or H for basic amino acids
  MISC_FEATURE (20)..(20): X is A and G
  MISC_FEATURE (21)..(21): X is A and G
  MISC_FEATURE (22)..(22): X is I, L or V
  MISC_FEATURE (23)..(23): X is I, L or V
  MISC_FEATURE (24)..(24): X is C or S
  MISC_FEATURE (25)..(25): X is T or S
  MISC_FEATURE (26)..(26): X is A or G
  MISC_FEATURE (27)..(27): X is I, L or V
  MISC_FEATURE (28)..(28): X is I, L or V
XXXXXXXXXXXXXXXXXXXXXXXXXXXX

SEQ ID NO: 265 - protein, 28 aa, Artificial
  Completely synthesized peptide construct
DRSTKVIDFHGGGDGQEEKAGVVSTGLI

SEQ ID NO: 266 - protein, 28 aa, Artificial
  peptide construct
  MISC_FEATURE (1)..(1): X is D and E for acidic amino acids
  MISC_FEATURE (2)..(2): X is K, R or H for basic amino acids
  MISC_FEATURE (3)..(3): X is C or S
  MISC_FEATURE (4)..(4): X is T or S
  MISC_FEATURE (5)..(5): X is K, R or H for basic amino acids
  MISC_FEATURE (6)..(6): X is I, L or V
  MISC_FEATURE (7)..(7): X is I, L or V
  MISC_FEATURE (8)..(8): X is D and E for acidic amino acids
  MISC_FEATURE (9)..(9): X is F, W  or Y for aromatic amino acids
  MISC_FEATURE (10)..(10): X is K, R or H for basic amino acids
  MISC_FEATURE (11)..(11): X is A and G
  MISC_FEATURE (12)..(12): X is  A or G
  MISC_FEATURE (13)..(13): X is A and G
  MISC_FEATURE (14)..(14): X is D and E for acidic amino acids
  MISC_FEATURE (15)..(15): X is A and G
  MISC_FEATURE (16)..(16): X is N or Q for amidated amino acids
  MISC_FEATURE (17)..(17): X is D and E for acidic amino acids
  MISC_FEATURE (18)..(18): X is D and E for acidic amino acids
  MISC_FEATURE (19)..(19): X is K, R or H for basic amino acids
  MISC_FEATURE (20)..(20): X is A and G
  MISC_FEATURE (21)..(21): X is A and G
  MISC_FEATURE (22)..(22): X is I, L or V
  MISC_FEATURE (23)..(23): X is I, L or V
  MISC_FEATURE (24)..(24): X is C or S
  MISC_FEATURE (25)..(25): X is T or S
  MISC_FEATURE (26)..(26): X is A or G
  MISC_FEATURE (27)..(27): X is I, L or V
  MISC_FEATURE (28)..(28): X is I, L or V
XXXXXXXXXXXXXXXXXXXXXXXXXXXX

SEQ ID NO: 267 - protein, 31 aa, Artificial
  Completely synthesized peptide construct
IAGFKGEQGPKGEGGGDGQEEKAGVVSTGLI

SEQ ID NO: 268 - protein, 31 aa, Artificial; identical to SEQ ID NO: 123
  peptide construct
  MISC_FEATURE (1)..(1): X is I, L or V
  MISC_FEATURE (2)..(2): X is A or G
  MISC_FEATURE (3)..(3): X is A or G
  MISC_FEATURE (4)..(4): X is F, W or Y for aromatic amino acids
  MISC_FEATURE (5)..(5): X is K, R or H for basic amino acids
  MISC_FEATURE (6)..(6): X is A or G
  MISC_FEATURE (7)..(7): X is D and E for acidic amino acids
  MISC_FEATURE (8)..(8): X is N or Q for amidated amino acids
  MISC_FEATURE (9)..(9): X is A or G
  MISC_FEATURE (10)..(10): X is F or P
  MISC_FEATURE (11)..(11): X is K, R or H for basic amino acids
  MISC_FEATURE (12)..(12): X is A or G
  MISC_FEATURE (13)..(13): X is D and E for acidic amino acids
  MISC_FEATURE (14)..(14): X is A and G
  MISC_FEATURE (15)..(15): X is A for G
  MISC_FEATURE (16)..(16): X is A and G
  MISC_FEATURE (17)..(17): X is D and E for acidic amino acids
  MISC_FEATURE (18)..(18): X is A and G
  MISC_FEATURE (19)..(19): X is N or Q for amidated amino acids
  MISC_FEATURE (20)..(20): X is D and E for acidic amino acids
  MISC_FEATURE (21)..(21): X is D and E for acidic amino acids
  MISC_FEATURE (22)..(22): X is K, R or H for basic amino acids
  MISC_FEATURE (23)..(23): X is A and G
  MISC_FEATURE (24)..(24): X is A and G
  MISC_FEATURE (25)..(25): X is I, L or V
  MISC_FEATURE (26)..(26): X is I, L or V
  MISC_FEATURE (27)..(27): X is C or S
  MISC_FEATURE (28)..(28): X is T or S
  MISC_FEATURE (29)..(29): X is A and G
  MISC_FEATURE (30)..(30): X is I, L or V
  MISC_FEATURE (31)..(31): X is I, L or V

SEQ ID NO: 269 - protein, 18 aa, Artificial
  Completely synthesized peptide construct
GGGDGQEEKAGVVSTGLI

SEQ ID NO: 270 - protein, 35 aa, Artificial; identical to SEQ ID NO: 197
  peptide construct
  MISC_FEATURE (1)..(1): X is T or S
  MISC_FEATURE (2)..(2): X is I, L or V
  MISC_FEATURE (3)..(3): X is K, R or H for basic amino acids
  MISC_FEATURE (4)..(4): X is I, L or V
  MISC_FEATURE (5)..(5): X is T or S
  MISC_FEATURE (6)..(6): X is I, L or V
  MISC_FEATURE (7)..(7): X is A and G
  MISC_FEATURE (8)..(8): X is I, L or V
  MISC_FEATURE (9)..(9): X is K, R or H for basic amino acids
  MISC_FEATURE (10)..(10): X is N or Q for amidated amino acids
  MISC_FEATURE (11)..(11): X is K, R or H for basic amino acids
  MISC_FEATURE (12)..(12): X is A and G
  MISC_FEATURE (13)..(13): X is D and E for acidic amino acids
  MISC_FEATURE (14)..(14): X is F or P
  MISC_FEATURE (15)..(15): X is K, R or H for basic amino acids
  MISC_FEATURE (16)..(16): X is N or Q for amidated amino acids
  MISC_FEATURE (17)..(17): X is T or S
  MISC_FEATURE (18)..(18): X is A and G
  MISC_FEATURE (19)..(19): X is A and G
  MISC_FEATURE (20)..(20): X is A and G
  MISC_FEATURE (21)..(21): X is D and E for acidic amino acids
  MISC_FEATURE (22)..(22): X is A and G
  MISC_FEATURE (23)..(23): X is N or Q for amidated amino acids
  MISC_FEATURE (24)..(24): X is D and E for acidic amino acids
  MISC_FEATURE (25)..(25): X is D and E for acidic amino acids
  MISC_FEATURE (26)..(26): X is K, R or H for basic amino acids
  MISC_FEATURE (27)..(27): X is A and G
  MISC_FEATURE (28)..(28): X is A and G
  MISC_FEATURE (29)..(29): X is I, L or V
  MISC_FEATURE (30)..(30): X is I, L or V
  MISC_FEATURE (31)..(31): X is C or S
  MISC_FEATURE (32)..(32): X is T or S
  MISC_FEATURE (33)..(33): X is A and G
  MISC_FEATURE (34)..(34): X is I, L or V
  MISC_FEATURE (35)..(35): X is I, L or V

SEQ ID NO: 271 - protein, 26 aa, Artificial
  Completely synthesized peptide construct
KNIVTPRTGGGDGQEEKAGVVSTGLI

SEQ ID NO: 272 - protein, 26 aa, Artificial
  peptide construct
  MISC_FEATURE (1)..(1): X is K, R or H for basic amino acids
  MISC_FEATURE (2)..(2): X is N or Q for amidated amino acids
  MISC_FEATURE (3)..(3): X is I, L or V
  MISC_FEATURE (4)..(4): X is I, L or V
  MISC_FEATURE (5)..(5): X is T or S
  MISC_FEATURE (6)..(6): X is F or  P
  MISC_FEATURE (7)..(7): X is K, R or H for basic amino acids
  MISC_FEATURE (8)..(8): X is T or S
  MISC_FEATURE (9)..(9): X is A and G
  MISC_FEATURE (10)..(10): X is A or G
  MISC_FEATURE (11)..(11): X is A and G
  MISC_FEATURE (12)..(12): X is D and E for acidic amino acids
  MISC_FEATURE (13)..(13): X is A and G
  MISC_FEATURE (14)..(14): X is N or Q for amidated amino acids
  MISC_FEATURE (15)..(15): X is D and E for acidic amino acids
  MISC_FEATURE (16)..(16): X is D and E for acidic amino acids
  MISC_FEATURE (17)..(17): X is K, R or H for basic amino acids
  MISC_FEATURE (18)..(18): X is A and G
  MISC_FEATURE (19)..(19): X is A and G
  MISC_FEATURE (20)..(20): X is I, L or V
  MISC_FEATURE (21)..(21): X is I, L or V
  MISC_FEATURE (22)..(22): X is C or S
  MISC_FEATURE (23)..(23): X is T or S
  MISC_FEATURE (24)..(24): X is A and G
  MISC_FEATURE (25)..(25): X is I, L or V
  MISC_FEATURE (26)..(26): X is I, L or V
XXXXXXXXXXXXXXXXXXXXXXXXXX

SEQ ID NO: 273 - protein, 33 aa, Artificial
  Completely synthesized peptide construct
GDKVSFFCKNKEKKCGGGDGQEEKAGVVSTGLI

SEQ ID NO: 274 - protein, 33 aa, Artificial; identical to SEQ ID NO: 97
  peptide construct
  MISC_FEATURE (1)..(1): X is A or G
  MISC_FEATURE (2)..(2): X is D and E for acidic amino acids
  MISC_FEATURE (3)..(3): X is K, R or H for basic amino acids
  MISC_FEATURE (4)..(4): X is I, L or V
  MISC_FEATURE (5)..(5): X is C or S
  MISC_FEATURE (6)..(6): X is F, W or Y for aromatic amino acids
  MISC_FEATURE (7)..(7): X is F, W or Y for aromatic amino acids
  MISC_FEATURE (8)..(8): X is C or S
  MISC_FEATURE (9)..(9): X is K, R or H for basic amino acids
  MISC_FEATURE (10)..(10): X is N or Q for amidated amino acids
  MISC_FEATURE (11)..(11): X is K, R or H for basic amino acids
  MISC_FEATURE (12)..(12): X is D and E for acidic amino acids
  MISC_FEATURE (13)..(13): X is K, R or H for basic amino acids
  MISC_FEATURE (14)..(14): X is K, R or H for basic amino acids
  MISC_FEATURE (15)..(15): X is C or S
  MISC_FEATURE (16)..(16): X is A and G
  MISC_FEATURE (17)..(17): X is A or G
  MISC_FEATURE (18)..(18): X is A and G
  MISC_FEATURE (19)..(19): X is D and E for acidic amino acids
  MISC_FEATURE (20)..(20): X is A and G
  MISC_FEATURE (21)..(21): X is N or Q for amidated amino acids
  MISC_FEATURE (22)..(22): X is D and E for acidic amino acids
  MISC_FEATURE (23)..(23): X is D and E for acidic amino acids
  MISC_FEATURE (24)..(24): X is K, R or H for basic amino acids
  MISC_FEATURE (25)..(25): X is A and G
  MISC_FEATURE (26)..(26): X is A and G
  MISC_FEATURE (27)..(27): X is I, L or V
  MISC_FEATURE (28)..(28): X is I, L or V
  MISC_FEATURE (29)..(29): X is C or S
  MISC_FEATURE (30)..(30): X is T or S
  MISC_FEATURE (31)..(31): X is A and G
  MISC_FEATURE (32)..(32): X is I, L or V
  MISC_FEATURE (33)..(33): X is I, L or V

SEQ ID NO: 275 - protein, 35 aa, Artificial
  Completely synthesized peptide construct
EIIVTHFPFDEQNCSMKGGGDGQEEKAGVVSTGLI

SEQ ID NO: 276 - protein, 35 aa, Artificial; identical to SEQ ID NO: 197
  peptide construct
  MISC_FEATURE (1)..(1): X is D and E for acidic amino acids
  MISC_FEATURE (2)..(2): X is I, L or V
  MISC_FEATURE (3)..(3): X is I, L or V
  MISC_FEATURE (4)..(4): X is I, L or V
  MISC_FEATURE (5)..(5): X is T or S
  MISC_FEATURE (6)..(6): X is K, R or H for basic amino acids
  MISC_FEATURE (7)..(7): X is F, W or Y for aromatic amino acids
  MISC_FEATURE (8)..(8): X is F or P
  MISC_FEATURE (9)..(9): X is F, W or Y for aromatic amino acids
  MISC_FEATURE (10)..(10): X is D and E for acidic amino acids
  MISC_FEATURE (11)..(11): X is D and E for acidic amino acids
  MISC_FEATURE (12)..(12): X is N or Q for amidated amino acids
  MISC_FEATURE (13)..(13): X is N or Q for amidated amino acids
  MISC_FEATURE (14)..(14): X is C or S
  MISC_FEATURE (15)..(15): X is C or S
  MISC_FEATURE (16)..(16): X is M or Nle
  MISC_FEATURE (17)..(17): X is K, R or H for basic amino acids
  MISC_FEATURE (18)..(18): X is A and G
  MISC_FEATURE (19)..(19): X is A or G
  MISC_FEATURE (20)..(20): X is A and G
  MISC_FEATURE (21)..(21): X is D and E for acidic amino acids
  MISC_FEATURE (22)..(22): X is A and G
  MISC_FEATURE (23)..(23): X is N or Q for amidated amino acids
  MISC_FEATURE (24)..(24): X is  D and E for acidic amino acids
  MISC_FEATURE (25)..(25): X is D and E for acidic amino acids
  MISC_FEATURE (26)..(26): X is K, R or H for basic amino acids
  MISC_FEATURE (27)..(27): X is A and G
  MISC_FEATURE (28)..(28): X is A and G
  MISC_FEATURE (29)..(29): X is I, L or V
  MISC_FEATURE (30)..(30): X is I, L or V
  MISC_FEATURE (31)..(31): X is C or S
  MISC_FEATURE (32)..(32): X is T or S
  MISC_FEATURE (33)..(33): X is A or G
  MISC_FEATURE (34)..(34): X is I, L or V
  MISC_FEATURE (35)..(35): X is I, L or V

SEQ ID NO: 277 - protein, 31 aa, Artificial
  Completely synthesized peptide construct
VHFFKNIVTPRTPGGGDGQEEKAGVVSTGLI

SEQ ID NO: 278 - protein, 31 aa, Artificial; identical to SEQ ID NO: 123
  peptide construct
  MISC_FEATURE (1)..(1): X is I, L or V
  MISC_FEATURE (2)..(2): X is K, R or H for basic amino acids
  MISC_FEATURE (3)..(3): X is F, W or Y for aromatic amino acids
  MISC_FEATURE (4)..(4): X is F, W or Y for aromatic amino acids
  MISC_FEATURE (5)..(5): X is K, R or H for basic amino acids
  MISC_FEATURE (6)..(6): X is N or Q for amidated amino acids
  MISC_FEATURE (7)..(7): X is I, L or V
  MISC_FEATURE (8)..(8): X is I, L or V
  MISC_FEATURE (9)..(9): X is T or S
  MISC_FEATURE (10)..(10): X is F or P
  MISC_FEATURE (11)..(11): X is K, R or H for basic amino acids
  MISC_FEATURE (12)..(12): X is T or S
  MISC_FEATURE (13)..(13): X is F or P
  MISC_FEATURE (14)..(14): X is A and G
  MISC_FEATURE (15)..(15): X is A or G
  MISC_FEATURE (16)..(16): X is A and G
  MISC_FEATURE (17)..(17): X is D and E for acidic amino acids
  MISC_FEATURE (18)..(18): X is A and G
  MISC_FEATURE (19)..(19): X is N or Q for amidated amino acids
  MISC_FEATURE (20)..(20): X is D and E for acidic amino acids
  MISC_FEATURE (21)..(21): X is D and E for acidic amino acids
  MISC_FEATURE (22)..(22): X is K, R or H for basic amino acids
  MISC_FEATURE (23)..(23): X is A and G
  MISC_FEATURE (24)..(24): X is A and G
  MISC_FEATURE (25)..(25): X is I, L or V
  MISC_FEATURE (26)..(26): X is I, L or V
  MISC_FEATURE (27)..(27): X is C or S
  MISC_FEATURE (28)..(28): X is T or S
  MISC_FEATURE (29)..(29): X is A and G
  MISC_FEATURE (30)..(30): X is I, L or V
  MISC_FEATURE (31)..(31): X is I, L or V

SEQ ID NO: 279 - protein, 36 aa, Artificial
  Completely synthesized peptide construct
YQQLNSERVGVPNENIENGGGDGQEEKAGVVSTGLI

SEQ ID NO: 280 - protein, 35 aa, Artificial; identical to SEQ ID NO: 197
  peptide construct
  MISC_FEATURE (1)..(1): X is F, W or Y for aromatic amino acids
  MISC_FEATURE (2)..(2): X is N or Q for amidated amino acids
  MISC_FEATURE (3)..(3): X is N or Q for amidated amino acids
  MISC_FEATURE (4)..(4): X is I, L or V
  MISC_FEATURE (5)..(5): X is N or Q for amidated amino acids
  MISC_FEATURE (6)..(6): X is C or S
  MISC_FEATURE (7)..(7): X is D and E for acidic amino acids
  MISC_FEATURE (8)..(8): X is K, R or H for basic amino acids
  MISC_FEATURE (9)..(9): X is A or G
  MISC_FEATURE (10)..(10): X is I, L or V
  MISC_FEATURE (11)..(11): X is F or P
  MISC_FEATURE (12)..(12): X is N or Q for amidated amino acids
  MISC_FEATURE (13)..(13): X is D and E for acidic amino acids
  MISC_FEATURE (14)..(14): X is N or Q for amidated amino acids
  MISC_FEATURE (15)..(15): X is I, L or V
  MISC_FEATURE (16)..(16): X is D and E for acidic amino acids
  MISC_FEATURE (17)..(17): X is N or Q for amidated amino acids
  MISC_FEATURE (18)..(18): X is A and G
  MISC_FEATURE (19)..(19): X is A or G
  MISC_FEATURE (20)..(20): X is  A and G
  MISC_FEATURE (21)..(21): X is D and E for acidic amino acids
  MISC_FEATURE (22)..(22): X is A and G
  MISC_FEATURE (23)..(23): X is N or Q for amidated amino acids
  MISC_FEATURE (24)..(24): X is D and E for acidic amino acids
  MISC_FEATURE (25)..(25): X is D and E for acidic amino acids
  MISC_FEATURE (26)..(26): X is K, R or H for basic amino acids
  MISC_FEATURE (27)..(27): X is A and G
  MISC_FEATURE (28)..(28): X is A and G
  MISC_FEATURE (29)..(29): X is I, L or V
  MISC_FEATURE (30)..(30): X is I, L or V
  MISC_FEATURE (31)..(31): X is C or S
  MISC_FEATURE (32)..(32): X is T or S
  MISC_FEATURE (33)..(33): X is A or G
  MISC_FEATURE (34)..(34): X is I, L or V
  MISC_FEATURE (35)..(35): X is I, L or V

SEQ ID NO: 281 - protein, 31 aa, Artificial
  Completely synthesized peptide construct
VFIKRVSNVIIHGGGGDGQEEKAGVVSTGLI

SEQ ID NO: 282 - protein, 31 aa, Artificial; identical to SEQ ID NO: 123
  peptide construct
  MISC_FEATURE (1)..(1): X is I, L or V
  MISC_FEATURE (2)..(2): X is F, W or Y for aromatic amino acids
  MISC_FEATURE (3)..(3): X is I, L or V
  MISC_FEATURE (4)..(4): X is K,  R or H for basic amino acids
  MISC_FEATURE (5)..(5): X is K, R or H for basic amino acids
  MISC_FEATURE (6)..(6): X is I, L or V
  MISC_FEATURE (7)..(7): X is C or S
  MISC_FEATURE (8)..(8): X is N or Q for amidated amino acids
  MISC_FEATURE (9)..(9): X is I, L or V
  MISC_FEATURE (10)..(10): X is I, L or V
  MISC_FEATURE (11)..(11): X is I, L or V
  MISC_FEATURE (12)..(12): X is K, R or H for basic amino acids
  MISC_FEATURE (13)..(13): X is A or G
  MISC_FEATURE (14)..(14): X is A and G
  MISC_FEATURE (15)..(15): X is A or G
  MISC_FEATURE (16)..(16): X is A and G
  MISC_FEATURE (17)..(17): X is D and E for acidic amino acids
  MISC_FEATURE (18)..(18): X is A and G
  MISC_FEATURE (19)..(19): X is N or Q for amidated amino acids
  MISC_FEATURE (20)..(20): X is D and E for acidic amino acids
  MISC_FEATURE (21)..(21): X is D and E for acidic amino acids
  MISC_FEATURE (22)..(22): X is K, R or H for basic amino acids
  MISC_FEATURE (23)..(23): X is A and G
  MISC_FEATURE (24)..(24): X is A and G
  MISC_FEATURE (25)..(25): X is I, L or V
  MISC_FEATURE (26)..(26): X is I, L or V
  MISC_FEATURE (27)..(27): X is C or S
  MISC_FEATURE (28)..(28): X is T or S
  MISC_FEATURE (29)..(29): X is A or G
  MISC_FEATURE (30)..(30): X is I, L or V
  MISC_FEATURE (31)..(31): X is I, L or V

SEQ ID NO: 283 - protein, 33 aa, Artificial
  Completely synthesized peptide construct
MKVTVAFNQFGPNRRGGGDGQEEKAGVVSTGLI

SEQ ID NO: 284 - protein, 33 aa, Artificial; identical to SEQ ID NO: 97
  peptide construct
  MISC_FEATURE (1)..(1): X is M or Nle
  MISC_FEATURE (2)..(2): X is K, R or H for basic amino acids
  MISC_FEATURE (3)..(3): X is I, L or V
  MISC_FEATURE (4)..(4): X is Tor S
  MISC_FEATURE (5)..(5): X is I, L or V
  MISC_FEATURE (6)..(6): X is A or G
  MISC_FEATURE (7)..(7): X is F, W or Y for amidated amino acids
  MISC_FEATURE (8)..(8): X is N or Q for amidated amion acids
  MISC_FEATURE (9)..(9): X is N or Q for amidated amino acids
  MISC_FEATURE (10)..(10): X is F, W or Y for aromatic amino acids
  MISC_FEATURE (11)..(11): X is A or G
  MISC_FEATURE (12)..(12): X is F or P
  MISC_FEATURE (13)..(13): X is N or Q for amidated amino acids
  MISC_FEATURE (14)..(14): X is K, R or H for basic amino acids
  MISC_FEATURE (15)..(15): X is K, R or H for basic amino acids
  MISC_FEATURE (16)..(16): X is A and G
  MISC_FEATURE (17)..(17): X is A or G
  MISC_FEATURE (18)..(18): X is A and G
  MISC_FEATURE (19)..(19): X is D and E for acidic amino acids
  MISC_FEATURE (20)..(20): X is A and G
  MISC_FEATURE (21)..(21): X is N or Q for amidated amino acids
  MISC_FEATURE (22)..(22): X is D and E for acidic amino acids
  MISC_FEATURE (23)..(23): X is D and E for acidic amino acids
  MISC_FEATURE (24)..(24): X is K, R or H for basic amino acids
  MISC_FEATURE (25)..(25): X is A and G
  MISC_FEATURE (26)..(26): X is A and G
  MISC_FEATURE (27)..(27): X is  I, L or V
  MISC_FEATURE (28)..(28): X is I, L or V
  MISC_FEATURE (29)..(29): X is C or S
  MISC_FEATURE (30)..(30): X is T or S
  MISC_FEATURE (31)..(31): X is A or G
  MISC_FEATURE (32)..(32): X is I, L or V
  MISC_FEATURE (33)..(33): X is I, L or V

SEQ ID NO: 285 - protein, 33 aa, Artificial
  Completely synthesized peptide construct
IASRRVDGIIAAYQNGGGDGQEEKAGVVSTGLI

SEQ ID NO: 286 - protein, 33 aa, Artificial; identical to SEQ ID NO: 97
  peptide construct
  MISC_FEATURE (1)..(1): X is I, L or V
  MISC_FEATURE (2)..(2): X is A or G
  MISC_FEATURE (3)..(3): X is C or S
  MISC_FEATURE (4)..(4): X is K, R or H for basic amino acids
  MISC_FEATURE (5)..(5): X is K, R or H for basic amino acids
  MISC_FEATURE (6)..(6): X is I, L or V
  MISC_FEATURE (7)..(7): X is D and E for acidic amino acids
  MISC_FEATURE (8)..(8): X is A or G
  MISC_FEATURE (9)..(9): X is I, L or V
  MISC_FEATURE (10)..(10): X is I, L or V
  MISC_FEATURE (11)..(11): X is A or G
  MISC_FEATURE (12)..(12): X is A or G
  MISC_FEATURE (13)..(13): X is F, W or Y for aromatic amino acids
  MISC_FEATURE (14)..(14): X is N or Q for amidated amino acids
  MISC_FEATURE (15)..(15): X is N or Q for amidated amino acids
  MISC_FEATURE (16)..(16): X is A and G
  MISC_FEATURE (17)..(17): X is A or G
  MISC_FEATURE (18)..(18): X is A and G
  MISC_FEATURE (19)..(19): X is D and E for acidic amino acids
  MISC_FEATURE (20)..(20): X is A and G
  MISC_FEATURE (21)..(21): X is N or Q for amidated amino acids
  MISC_FEATURE (22)..(22): X is D and E for acidic amino acids
  MISC_FEATURE (23)..(23): X is D and E for acidic amino acids
  MISC_FEATURE (24)..(24): X is K, R or H for basic amino acids
  MISC_FEATURE (25)..(25): X is A and G
  MISC_FEATURE (26)..(26): X is A and G
  MISC_FEATURE (27)..(27): X is I, L or V
  MISC_FEATURE (28)..(28): X is I, L or V
  MISC_FEATURE (29)..(29): X is C or S
  MISC_FEATURE (30)..(30): X is T or S
  MISC_FEATURE (31)..(31): X is A or G
  MISC_FEATURE (32)..(32): X is I, L or V
  MISC_FEATURE (33)..(33): X is I, L or V

SEQ ID NO: 287 - protein, 37 aa, Artificial
  Completely synthesized peptide construct
IDIFASKNFHLQKNTIGTGGGGDGQEEKAGVVSTGLI

SEQ ID NO: 288 - protein, 37 aa, Artificial; identical to SEQ ID NO: 151
  peptide construct
  MISC_FEATURE (1)..(1): X is I, L or V
  MISC_FEATURE (2)..(2): X is D and E for acidic amino acids
  MISC_FEATURE (3)..(3): X is I, L or V
  MISC_FEATURE (4)..(4): X is F, W or  Y for aromatic amino acids
  MISC_FEATURE (5)..(5): X is A or G
  MISC_FEATURE (6)..(6): X is C or S
  MISC_FEATURE (7)..(7): X is K, R or H for basic amino acids
  MISC_FEATURE (8)..(8): X is N or Q for amidated amino acids
  MISC_FEATURE (9)..(9): X is F, W or Y for aromatic amino acids
  MISC_FEATURE (10)..(10): X is K, R or H for basic amino acids
  MISC_FEATURE (11)..(11): X is I, L or V
  MISC_FEATURE (12)..(12): X is N or Q for amidated amino acids
  MISC_FEATURE (13)..(13): X is K, R or H for basic amino acids
  MISC_FEATURE (14)..(14): X is N or Q for amidated amino acids
  MISC_FEATURE (15)..(15): X is T or S
  MISC_FEATURE (16)..(16): X is I, L or V
  MISC_FEATURE (17)..(17): X is A or G
  MISC_FEATURE (18)..(18): X is T or S
  MISC_FEATURE (19)..(19): X is A or G
  MISC_FEATURE (20)..(20): X is A and G
  MISC_FEATURE (21)..(21): X is A or G
  MISC_FEATURE (22)..(22): X is A and G
  MISC_FEATURE (23)..(23): X is D and E for acidic amino acids
  MISC_FEATURE (24)..(24): X is A and G
  MISC_FEATURE (25)..(25): X is N or Q for amidated amino acids
  MISC_FEATURE (26)..(26): X is D and E for acidic amino acids
  MISC_FEATURE (27)..(27): X is D and E for acidic amino acids
  MISC_FEATURE (28)..(28): X is K, R or H for basic amino acids
  MISC_FEATURE (29)..(29): X is A and G
  MISC_FEATURE (30)..(30): X is A and G
  MISC_FEATURE (31)..(31): X is I, L or V
  MISC_FEATURE (32)..(32): X is I, L or V
  MISC_FEATURE (33)..(33): X is C or S
  MISC_FEATURE (34)..(34): X is T or S
  MISC_FEATURE (35)..(35): X is A or G
  MISC_FEATURE (36)..(36): X is I, L or V
  MISC_FEATURE (37)..(37): X is I, L or V

SEQ ID NO: 289 - protein, 43 aa, Artificial
  Completely synthesized peptide construct
GIGAVLKVLTTGPALISWIKRKRQQGGGDGQEEKAGVVSTGLI

SEQ ID NO: 290 - protein, 43 aa, Artificial; identical to SEQ ID NO: 211
  peptide construct
  MISC_FEATURE (1)..(1): X is D and E for acidic amino acids
  MISC_FEATURE (2)..(2): X is I, L or V
  MISC_FEATURE (3)..(3): X is A or G
  MISC_FEATURE (4)..(4): X is A or G
  MISC_FEATURE (5)..(5): X is I, L or V
  MISC_FEATURE (6)..(6): X is I, L or V
  MISC_FEATURE (7)..(7): X is K, R or H for basic amino acids
  MISC_FEATURE (8)..(8): X is I, L or V
  MISC_FEATURE (9)..(9): X is I, L or V
  MISC_FEATURE (10)..(10): X is T or S
  MISC_FEATURE (11)..(11): X is T or S
  MISC_FEATURE (12)..(12): X is A or G
  MISC_FEATURE (13)..(13): X is F or P
  MISC_FEATURE (14)..(14): X is A or G
  MISC_FEATURE (15)..(15): X is I, L or V
  MISC_FEATURE (16)..(16): X is I, L or V
  MISC_FEATURE (17)..(17): X is C or S
  MISC_FEATURE (18)..(18): X is F, W or  Y for aromatic amino acids
  MISC_FEATURE (19)..(19): X is I, L or V
  MISC_FEATURE (20)..(20): X is K, R or H for basic amino acids
  MISC_FEATURE (21)..(21): X is K, R or H for basic amino acids
  MISC_FEATURE (22)..(22): X is K, R or H for basic amino acids
  MISC_FEATURE (23)..(23): X is K, R or H for basic amino acids
  MISC_FEATURE (24)..(24): X is N or Q for amidated amino acids
  MISC_FEATURE (25)..(25): X is N or Q for amidated amino acids
  MISC_FEATURE (26)..(26): X is A and G
  MISC_FEATURE (27)..(27): X is A or G
  MISC_FEATURE (28)..(28): X is A and G
  MISC_FEATURE (29)..(29): X is D and E for acidici amino acids
  MISC_FEATURE (30)..(30): X is A and G
  MISC_FEATURE (31)..(31): X is N or Q for amidated amino acids
  MISC_FEATURE (32)..(32): X is D and E for acidic amino acids
  MISC_FEATURE (33)..(33): X is D and E for acidic amino acids
  MISC_FEATURE (34)..(34): X is K, R or H for basic amino acids
  MISC_FEATURE (35)..(35): X is A and G
  MISC_FEATURE (36)..(36): X is A and G
  MISC_FEATURE (37)..(37): X is  I, L or V
  MISC_FEATURE (38)..(38): X is I, L or V
  MISC_FEATURE (39)..(39): X is C or S
  MISC_FEATURE (40)..(40): X is T or S
  MISC_FEATURE (41)..(41): X is A or G
  MISC_FEATURE (42)..(42): X is I, L or V
  MISC_FEATURE (43)..(43): X is I, L or V

SEQ ID NO: 291 - protein, 56 aa, Artificial
  Completely synthesized peptide construct
DLLKNGERIEKVEGGGDAEFRHDSGYEVHHQKLVFFAEDVGSNKGAIIGLMVGGVV

SEQ ID NO: 292 - protein, 56 aa, Artificial
  peptide construct
  MISC_FEATURE (1)..(1): X is D and E for acidic amino acids
  MISC_FEATURE (2)..(2): X is I, L or V
  MISC_FEATURE (3)..(3): X is I, L or V
  MISC_FEATURE (4)..(4): X is K, R or H for basic amino acids
  MISC_FEATURE (5)..(5): X is N or Q for amidated amino acids
  MISC_FEATURE (6)..(6): X is A or G
  MISC_FEATURE (7)..(7): X is D and E for acidic amino acids
  MISC_FEATURE (8)..(8): X is K, R or H for basic amino acids
  MISC_FEATURE (9)..(9): X is I, L or V
  MISC_FEATURE (10)..(10): X is D and E for acidic amino acids
  MISC_FEATURE (11)..(11): X is K, R or H for basic amino acids
  MISC_FEATURE (12)..(12): X is I, L or V
  MISC_FEATURE (13)..(13): X is D and E for acidic amino acids
  MISC_FEATURE (14)..(14): X is A or G
  MISC_FEATURE (15)..(15): X is A or G
  MISC_FEATURE (16)..(16): X is A or G
  MISC_FEATURE (17)..(17): X is D and E for acidic amino acids
  MISC_FEATURE (18)..(18): X is A or G
  MISC_FEATURE (19)..(19): X is D and E for acidic amino acids
  MISC_FEATURE (20)..(20): X is F, W or Y for aromatic amino acids
  MISC_FEATURE (21)..(21): X is K, R or H for basic amino acids
  MISC_FEATURE (22)..(22): X is K, R or H for basic amino acids
  MISC_FEATURE (23)..(23): X is D and E for acidic amino acids
  MISC_FEATURE (24)..(24): X is T or S
  MISC_FEATURE (25)..(25): X is A or G
  MISC_FEATURE (26)..(26): X is F, W or Y for aromatic amino acids
  MISC_FEATURE (27)..(27): X is D and E for acidic amino acids
  MISC_FEATURE (28)..(28): X is I, L or V
  MISC_FEATURE (29)..(29): X is K, R or H for basic amino acids
  MISC_FEATURE (30)..(30): X is K, R or H for basic amino acids
  MISC_FEATURE (31)..(31): X is N or Q for amidated amino acids
  MISC_FEATURE (32)..(32): X is K, R or H for basic amino acids
  MISC_FEATURE (33)..(33): X is I, L or V
  MISC_FEATURE (34)..(34): X is I, L or V
  MISC_FEATURE (35)..(35): X is F, W or Y for aromatic amino acids
  MISC_FEATURE (36)..(36): X is F, W or Y for aromatic amino acids
  MISC_FEATURE (37)..(37): X is A or G
  MISC_FEATURE (38)..(38): X is D and E for acidic amino acids
  MISC_FEATURE (39)..(39): X is D and E for acidic amino acids
  MISC_FEATURE (40)..(40): X is I, L or V
  MISC_FEATURE (41)..(41): X is A or G
  MISC_FEATURE (42)..(42): X is C or S
  MISC_FEATURE (43)..(43): X is N or Q for amidated amino acids
  MISC_FEATURE (44)..(44): X is K, R or H for basic amino acids
  MISC_FEATURE (45)..(45): X is A or G
  MISC_FEATURE (46)..(46): X is A or G
  MISC_FEATURE (47)..(47): X is I, L or V
  MISC_FEATURE (48)..(48): X is I, L or V
  MISC_FEATURE (49)..(49): X is A or G
  MISC_FEATURE (50)..(50): X is I, L or V
  MISC_FEATURE (51)..(51): X is M or Nle
  MISC_FEATURE (52)..(52): X is I, L or V
  MISC_FEATURE (53)..(53): X is A or G
  MISC_FEATURE (54)..(54): X is A or G
  MISC_FEATURE (55)..(55): X is I, L or V
  MISC_FEATURE (56)..(56): X is I, L or V
XXXXXXXXXXXXXXXXXXXXXXXXXXXXXXXXXXXXXXXXXXXXXXXXXXXXXXXX

SEQ ID NO: 293 - protein, 44 aa, Artificial
  Completely synthesized peptide construct
DLLKNGERIEKVEGGGDAEFRHDSGYEVHHQKLVFFAENVGSNK

SEQ ID NO: 294 - protein, 44 aa, Artificial
  peptide construct
  MISC_FEATURE (1)..(1): X is D and E for acidic amino acids
  MISC_FEATURE (2)..(2): X is I, L or V
  MISC_FEATURE (3)..(3): X is I, L or V
  MISC_FEATURE (4)..(4): X is K, R or H for basic amino acids
  MISC_FEATURE (5)..(5): X is N or Q for amidated amino acids
  MISC_FEATURE (6)..(6): X is A or G
  MISC_FEATURE (7)..(7): X is D and E for acidic amino acids
  MISC_FEATURE (8)..(8): X is K, R or H for basic amino acids
  MISC_FEATURE (9)..(9): X is I, L or V
  MISC_FEATURE (10)..(10): X is D and E for acidic amino acids
  MISC_FEATURE (11)..(11): X is K, R or H for basic amino acids
  MISC_FEATURE (12)..(12): X is I, L or V
  MISC_FEATURE (13)..(13): X is D and E for acidic amino acids
  MISC_FEATURE (14)..(14): X is A or G
  MISC_FEATURE (15)..(15): X is A or G
  MISC_FEATURE (16)..(16): X is A or G
  MISC_FEATURE (17)..(17): X is D and E for acidic amino acids
  MISC_FEATURE (18)..(18): X is A or G
  MISC_FEATURE (19)..(19): X is D and E for acidic amino acids
  MISC_FEATURE (20)..(20): X is F, W or Y for aromatic amino acids
  MISC_FEATURE (21)..(21): X is K, R or H for basic amino acids
  MISC_FEATURE (22)..(22): X is K, R or H for basic amino acids
  MISC_FEATURE (23)..(23): X is D and E for acidic amino acids
  MISC_FEATURE (24)..(24): X is T or S
  MISC_FEATURE (25)..(25): X is A or G
  MISC_FEATURE (26)..(26): X is F, W or Y for aromatic amino acids
  MISC_FEATURE (27)..(27): X is D and E for acidic amino acids
  MISC_FEATURE (28)..(28): X is I, L or V
  MISC_FEATURE (29)..(29): X is K, R or H for basic amino acids
  MISC_FEATURE (30)..(30): X is K, R or H for basic amino acids
  MISC_FEATURE (31)..(31): X is N or Q for amidated amino acids
  MISC_FEATURE (32)..(32): X is K, R or H for basic amino acids
  MISC_FEATURE (33)..(33): X is I, L or V
  MISC_FEATURE (34)..(34): X is I, L or V
  MISC_FEATURE (35)..(35): X is F, W or Y for aromatic amino acids
  MISC_FEATURE (36)..(36): X is F, W or Y for aromatic amino acids
  MISC_FEATURE (37)..(37): X is A or G
  MISC_FEATURE (38)..(38): X is D and E for acidic amino acids
  MISC_FEATURE (39)..(39): X is D and E for acidic amino acids
  MISC_FEATURE (40)..(40): X is I, L or V
  MISC_FEATURE (41)..(41): X is A or G
  MISC_FEATURE (42)..(42): X is C or S
  MISC_FEATURE (43)..(43): X is N or Q for amidated amino acids
  MISC_FEATURE (44)..(44): X is K, R or H for basic amino acids
XXXXXXXXXXXXXXXXXXXXXXXXXXXXXXXXXXXXXXXXXXXX

SEQ ID NO: 295 - protein, 45 aa, Artificial
  Completely synthesized peptide construct
DLKNGERIEKVEGGGDAEFRHDSGYEVHHQKLVFFAENVGSNKAI

SEQ ID NO: 296 - protein, 46 aa, Artificial; identical to SEQ ID NO: 137
  peptide construct
  MISC_FEATURE (1)..(1): X is D and E for acidic amino acids
  MISC_FEATURE (2)..(2): X is I, L or V
  MISC_FEATURE (3)..(3): X is I, L or V
  MISC_FEATURE (4)..(4): X is K, R or H for basic amino acids
  MISC_FEATURE (5)..(5): X is N or Q for amidated amino acids
  MISC_FEATURE (6)..(6): X is A or G
  MISC_FEATURE (7)..(7): X is D and E for acidic amino acids
  MISC_FEATURE (8)..(8): X is K, R or H for basic amino acids
  MISC_FEATURE (9)..(9): X is I, L or V
  MISC_FEATURE (10)..(10): X is D and E for acidic amino acids
  MISC_FEATURE (11)..(11): X is K, R or H for basic amino acids
  MISC_FEATURE (12)..(12): X is I, L or V
  MISC_FEATURE (13)..(13): X is D and E for acidic amino acids
  MISC_FEATURE (14)..(14): X is A or G
  MISC_FEATURE (15)..(15): X is A or G
  MISC_FEATURE (16)..(16): X is A or G
  MISC_FEATURE (17)..(17): X is D and E for acidic amino acids
  MISC_FEATURE (18)..(18): X is A or G
  MISC_FEATURE (19)..(19): X is D and E for acidic amino acids
  MISC_FEATURE (20)..(20): X is F, W or Y for aromatic amino acids
  MISC_FEATURE (21)..(21): X is K, R or H for basic amino acids
  MISC_FEATURE (22)..(22): X is K, R or H for basic amino acids
  MISC_FEATURE (23)..(23): X is D and E for acidic amino acids
  MISC_FEATURE (24)..(24): X is T or S
  MISC_FEATURE (25)..(25): X is A or G
  MISC_FEATURE (26)..(26): X is F, W or Y for aromatic amino acids
  MISC_FEATURE (27)..(27): X is D and E for acidic amino acids
  MISC_FEATURE (28)..(28): X is I, L or V
  MISC_FEATURE (29)..(29): X is K, R or H for basic amino acids
  MISC_FEATURE (30)..(30): X is K, R or H for basic amino acids
  MISC_FEATURE (31)..(31): X is N or Q for amidated amino acids
  MISC_FEATURE (32)..(32): X is K, R or H for basic amino acids
  MISC_FEATURE (33)..(33): X is I, L or V
  MISC_FEATURE (34)..(34): X is I, L or V
  MISC_FEATURE (35)..(35): X is F, W or Y for aromatic amino acids
  MISC_FEATURE (36)..(36): X is F, W or Y for aromatic amino acids
  MISC_FEATURE (37)..(37): X is A or G
  MISC_FEATURE (38)..(38): X is D and E for acidic amino acids
  MISC_FEATURE (39)..(39): X is D and E for acidic amino acids
  MISC_FEATURE (40)..(40): X is I, L or V
  MISC_FEATURE (41)..(41): X is A or G
  MISC_FEATURE (42)..(42): X is C or S
  MISC_FEATURE (43)..(43): X is N or Q for amidated amino acids
  MISC_FEATURE (44)..(44): X is K, R or H for basic amino acids
  MISC_FEATURE (45)..(45): X is A or G
  MISC_FEATURE (46)..(46): X is I, L or V

SEQ ID NO: 297 - protein, 27 aa, Artificial
  Completely synthesized peptide construct
DLLKNGERIEKVEGGGDAEFRHDSGYE

SEQ ID NO: 298 - protein, 27 aa, Artificial
  peptide construct
  MISC_FEATURE (1)..(1): X is D and E for acidic amino acids
  MISC_FEATURE (2)..(2): X is I, L or V
  MISC_FEATURE (3)..(3): X is I, L or V
  MISC_FEATURE (4)..(4): X is K, R or H for basic amino acids
  MISC_FEATURE (5)..(5): X is N or Q for amidated amino acids
  MISC_FEATURE (6)..(6): X is A or G
  MISC_FEATURE (7)..(7): X is D and E for acidic amino acids
  MISC_FEATURE (8)..(8): X is K, R or H for basic amino acids
  MISC_FEATURE (9)..(9): X is I, L or V
  MISC_FEATURE (10)..(10): X is D and E for acidic amino acids
  MISC_FEATURE (11)..(11): X is K, R or H for basic amino acids
  MISC_FEATURE (12)..(12): X is I, L or V
  MISC_FEATURE (13)..(13): X is D and E for acidic amino acids
  MISC_FEATURE (14)..(14): X is A or G
  MISC_FEATURE (15)..(15): X is A or G
  MISC_FEATURE (16)..(16): X is A or G
  MISC_FEATURE (17)..(17): X is D and E for acidic amino acids
  MISC_FEATURE (18)..(18): X is A or G
  MISC_FEATURE (19)..(19): X is D and E for acidic amino acids
  MISC_FEATURE (20)..(20): X is F, W or Y for aromatic amino acids
  MISC_FEATURE (21)..(21): X is K, R or H for basic amino acids
  MISC_FEATURE (22)..(22): X is K, R or H for basic amino acids
  MISC_FEATURE (23)..(23): X is D and E for acidic amino acids
  MISC_FEATURE (24)..(24): X is T or S
  MISC_FEATURE (25)..(25): X is A or G
  MISC_FEATURE (26)..(26): X is F, W or Y for aromatic amino acids
  MISC_FEATURE (27)..(27): X is D and E for acidic amino acids
XXXXXXXXXXXXXXXXXXXXXXXXXXX

SEQ ID NO: 299 - protein, 23 aa, Artificial
  Completely synthesized peptide construct
DLLKNGERIEKVEGGGENVGSNK

SEQ ID NO: 300 - protein, 23 aa, Artificial
  peptide construct
  MISC_FEATURE (1)..(1): X is D and E for acidic amino acids
  MISC_FEATURE (2)..(2): X is I, L or V
  MISC_FEATURE (3)..(3): X is I, L or V
  MISC_FEATURE (4)..(4): X is K, R or H for basic amino acids
  MISC_FEATURE (5)..(5): X is N or Q for amidated amino acids
  MISC_FEATURE (6)..(6): X is A or G
  MISC_FEATURE (7)..(7): X is D and E for acidic amino acids
  MISC_FEATURE (8)..(8): X is K, R or H for basic amino acids
  MISC_FEATURE (9)..(9): X is I, L or V
  MISC_FEATURE (10)..(10): X is D and E for acidic amino acids
  MISC_FEATURE (11)..(11): X is K, R or H for basic amino acids
  MISC_FEATURE (12)..(12): X is I, L or V
  MISC_FEATURE (13)..(13): X is D and E for acidic amino acids
  MISC_FEATURE (14)..(14): X is A or G
  MISC_FEATURE (15)..(15): X is A or G
  MISC_FEATURE (16)..(16): X is A or G
  MISC_FEATURE (17)..(17): X is D and E for acidic amino acids
  MISC_FEATURE (18)..(18): X is D and E for acidic amino acids
  MISC_FEATURE (19)..(19): X is I, L or V
  MISC_FEATURE (20)..(20): X is A or G
  MISC_FEATURE (21)..(21): X is C or S
  MISC_FEATURE (22)..(22): X is N or Q for amidated amino acids
  MISC_FEATURE (23)..(23): X is K, R or H for basic amino acids
XXXXXXXXXXXXXXXXXXXXXXX

SEQ ID NO: 301 - protein, 28 aa, Artificial
  Completely synthesized peptide construct
DLLKNGERIEKVEGGGDAEFRHDSGYEV

SEQ ID NO: 302 - protein, 28 aa, Artificial
  peptide construct
  MISC_FEATURE (1)..(1): X is D and E for acidic amino acids
  MISC_FEATURE (2)..(2): X is I, L or V
  MISC_FEATURE (3)..(3): X is I, L or V
  MISC_FEATURE (4)..(4): X is K, R or H for basic amino acids
  MISC_FEATURE (5)..(5): X is N or Q for amidated amino acids
  MISC_FEATURE (6)..(6): X is A or G
  MISC_FEATURE (7)..(7): X is D and E for acidic amino acids
  MISC_FEATURE (8)..(8): X is K, R or H for basic amino acids
  MISC_FEATURE (9)..(9): X is I, L or V
  MISC_FEATURE (10)..(10): X is D and E for acidic amino acids
  MISC_FEATURE (11)..(11): X is K, R or H for basic amino acids
  MISC_FEATURE (12)..(12): X is I, L or V
  MISC_FEATURE (13)..(13): X is D and E for acidic amino acids
  MISC_FEATURE (14)..(14): X is A or G
  MISC_FEATURE (15)..(15): X is A or G
  MISC_FEATURE (16)..(16): X is A or G
  MISC_FEATURE (17)..(17): X is D and E for acidic amino acids
  MISC_FEATURE (18)..(18): X is A or G
  MISC_FEATURE (19)..(19): X is D and E for acidic amino acids
  MISC_FEATURE (20)..(20): X is F, W or Y for aromatic amino acids
  MISC_FEATURE (21)..(21): X is K, R or H for basic amino acids
  MISC_FEATURE (22)..(22): X is K, R or H for basic amino acids
  MISC_FEATURE (23)..(23): X is D and E for acidic amino acids
  MISC_FEATURE (24)..(24): X is T or S
  MISC_FEATURE (25)..(25): X is A or G
  MISC_FEATURE (26)..(26): X is F, W or Y for aromatic amino acids
  MISC_FEATURE (27)..(27): X is D and E for acidic amino acids
  MISC_FEATURE (28)..(28): X is I, L or V
XXXXXXXXXXXXXXXXXXXXXXXXXXXX

SEQ ID NO: 303 - protein, 26 aa, Artificial
  Completely synthesized peptide construct
DLLKNGERIEKVEGGGDAEFRHDSGY

SEQ ID NO: 304 - protein, 26 aa, Artificial
  peptide construct
  MISC_FEATURE (1)..(1): X is D and E for acidic amino acids
  MISC_FEATURE (2)..(2): X is I, L or V
  MISC_FEATURE (3)..(3): X is I, L or V
  MISC_FEATURE (4)..(4): X is K, R or H for basic amino acids
  MISC_FEATURE (5)..(5): X is N or Q for amidated amino acids
  MISC_FEATURE (6)..(6): X is A or G
  MISC_FEATURE (7)..(7): X is D and E for acidic amino acids
  MISC_FEATURE (8)..(8): X is K, R or H for basic amino acids
  MISC_FEATURE (9)..(9): X is I, L or V
  MISC_FEATURE (10)..(10): X is D and E for acidic amino acids
  MISC_FEATURE (11)..(11): X is K, R or H for basic amino acids
  MISC_FEATURE (12)..(12): X is I, L or V
  MISC_FEATURE (13)..(13): X is D and E for acidic amino acids
  MISC_FEATURE (14)..(14): X is A or G
  MISC_FEATURE (15)..(15): X is A or G
  MISC_FEATURE (16)..(16): X is A or G
  MISC_FEATURE (17)..(17): X is D and E for acidic amino acids
  MISC_FEATURE (18)..(18): X is A or G
  MISC_FEATURE (19)..(19): X is D and Efor acidic amino acids
  MISC_FEATURE (20)..(20): X is F, W or Y for aromatic amino acids
  MISC_FEATURE (21)..(21): X is K, R or H for basic amino acids
  MISC_FEATURE (22)..(22): X is K, R or H for basic amino acids
  MISC_FEATURE (23)..(23): X is D and E for acidic amino acids
  MISC_FEATURE (24)..(24): X is T or S
  MISC_FEATURE (25)..(25): X is A or G
  MISC_FEATURE (26)..(26): X is F, W or Y for aromatic amino acids
XXXXXXXXXXXXXXXXXXXXXXXXXX

SEQ ID NO: 305 - protein, 20 aa, Artificial
  Completely synthesized peptide construct
DLLKNGERIEKVEGGGEFRH

SEQ ID NO: 306 - protein, 20 aa, Artificial
  peptide construct
  MISC_FEATURE (1)..(1): X  is D and E for acidic amino acids
  MISC_FEATURE (2)..(2): X is I, L or V
  MISC_FEATURE (3)..(3): X is I, L or V
  MISC_FEATURE (4)..(4): X is K, R or H for basic amino acids
  MISC_FEATURE (5)..(5): X is N or Q for aromatic amino acids
  MISC_FEATURE (6)..(6): X is A or G
  MISC_FEATURE (7)..(7): X is D and E for acidic amino acids
  MISC_FEATURE (8)..(8): X is K, R or H for basic amino acids
  MISC_FEATURE (9)..(9): X is I, L or V
  MISC_FEATURE (10)..(10): X is D and E for acidic amino acids
  MISC_FEATURE (11)..(11): X is K, R or H for basic amino acids
  MISC_FEATURE (12)..(12): X is I, L or V
  MISC_FEATURE (13)..(13): X is D and E for acidic amino acids
  MISC_FEATURE (14)..(14): X is A or G
  MISC_FEATURE (15)..(15): X is A or G
  MISC_FEATURE (16)..(16): X is A or G
  MISC_FEATURE (17)..(17): X is D and E for acidic amino acids
  MISC_FEATURE (18)..(18): X is F or P
  MISC_FEATURE (19)..(19): X is K, R or H for basic amino acids
  MISC_FEATURE (20)..(20): X is K, R or H for basic amino acids
XXXXXXXXXXXXXXXXXXXX

SEQ ID NO: 307 - protein, 35 aa, Artificial
  Completely synthesized peptide construct
DLLKNGERIEKVEGGGDSAFDVLSFTAEEKAGVYK

SEQ ID NO: 308 - protein, 35 aa, Artificial; identical to SEQ ID NO: 197
  peptide construct
  MISC_FEATURE (1)..(1): X is D and E for acidic amino acids
  MISC_FEATURE (2)..(2): X is I, L or V
  MISC_FEATURE (3)..(3): X is I, L or V
  MISC_FEATURE (4)..(4): X is K, R or H for basic amino acids
  MISC_FEATURE (5)..(5): X is N or Q for amidated amino acids
  MISC_FEATURE (6)..(6): X is A or G
  MISC_FEATURE (7)..(7): X is D and E for acidic amino acids
  MISC_FEATURE (8)..(8): X is K, R or H for basic amino acids
  MISC_FEATURE (9)..(9): X is I, L or V
  MISC_FEATURE (10)..(10): X is D and E for acidic amino acids
  MISC_FEATURE (11)..(11): X is K, R or H for basic amino acids
  MISC_FEATURE (12)..(12): X is I, L or V
  MISC_FEATURE (13)..(13): X is D and E for acidic amino acids
  MISC_FEATURE (14)..(14): X is A or G
  MISC_FEATURE (15)..(15): X is A or G
  MISC_FEATURE (16)..(16): X is A or G
  MISC_FEATURE (17)..(17): X is D and E for acidic amino acids
  MISC_FEATURE (18)..(18): X is C or S
  MISC_FEATURE (19)..(19): X is A or G
  MISC_FEATURE (20)..(20): X is F, W or Y for aromatic amino acids
  MISC_FEATURE (21)..(21): X is D and E for acidic amino acids
  MISC_FEATURE (22)..(22): X is I, L or V
  MISC_FEATURE (23)..(23): X is I, L or V
  MISC_FEATURE (24)..(24): X is C or S
  MISC_FEATURE (25)..(25): X is F, W or Y for aromatic amino acids
  MISC_FEATURE (26)..(26): X is T or S
  MISC_FEATURE (27)..(27): X is A or G
  MISC_FEATURE (28)..(28): X is D and E for acidic amino acids
  MISC_FEATURE (29)..(29): X is D and E for acidic amino acids
  MISC_FEATURE (30)..(30): X is K, R or H for basic amino acids
  MISC_FEATURE (31)..(31): X is A or G
  MISC_FEATURE (32)..(32): X is A or G
  MISC_FEATURE (33)..(33): X is I, L or V
  MISC_FEATURE (34)..(34): X is F, W or  Y for aromatic amino acids
  MISC_FEATURE (35)..(35): X is K, R or H for basic amino acids

SEQ ID NO: 309 - protein, 30 aa, Artificial Sequence
  Completely synthesized peptide construct
DLLKNGERIEKVEGGGSLKLMATLFSTYAS

SEQ ID NO: 310 - protein, 30 aa, Artificial; identical to SEQ ID NO: 56
  peptide construct
  MISC_FEATURE (1)..(1): X is D and E for acidic amino acids
  MISC_FEATURE (2)..(2): X is I, L or V
  MISC_FEATURE (3)..(3): X is I, L or V
  MISC_FEATURE (4)..(4): X is K, R or H for basic amino acids
  MISC_FEATURE (5)..(5): X is N or Q for amidated amino acids
  MISC_FEATURE (6)..(6): X is A or G
  MISC_FEATURE (7)..(7): X is D and E for acidic amino acids
  MISC_FEATURE (8)..(8): X is K, R or H for basic amino acids
  MISC_FEATURE (9)..(9): X is I, L or V
  MISC_FEATURE (10)..(10): X is D and E for acidic amino acids
  MISC_FEATURE (11)..(11): X is K, R or H for basic amino acids
  MISC_FEATURE (12)..(12): X is I, L or V
  MISC_FEATURE (13)..(13): X is D and E for acidic amino acids
  MISC_FEATURE (14)..(14): X is A or G
  MISC_FEATURE (15)..(15): X is A or G
  MISC_FEATURE (16)..(16): X is A or G
  MISC_FEATURE (17)..(17): X is C or S
  MISC_FEATURE (18)..(18): X is I, L or V
  MISC_FEATURE (19)..(19): X is K, R or H for basic amino acids
  MISC_FEATURE (20)..(20): X is I, L or V
  MISC_FEATURE (21)..(21): X is M  or Nle
  MISC_FEATURE (22)..(22): X is A or G
  MISC_FEATURE (23)..(23): X is  T or S
  MISC_FEATURE (24)..(24): X is I, L or V
  MISC_FEATURE (25)..(25): X is F or P
  MISC_FEATURE (26)..(26): X is C or S
  MISC_FEATURE (27)..(27): X is T or S
  MISC_FEATURE (28)..(28): X is F, W or Y for aromatic amino acids
  MISC_FEATURE (29)..(29): X is A or G
  MISC_FEATURE (30)..(30): X is C or S

SEQ ID NO: 311 - protein, 30 aa, Artificial Sequence
  Completely synthesized peptide construct
DLLKNGERIEKVEGGGSLKLMATLFSSYAT

SEQ ID NO: 312 - protein, 30 aa, Artificial; identical to SEQ ID NO: 56
  peptide construct
  MISC_FEATURE (1)..(1): X is D and E for acidic amino acids
  MISC_FEATURE (2)..(2): X is I, L or V
  MISC_FEATURE (3)..(3): X is I, L or V
  MISC_FEATURE (4)..(4): X is K, R or H for basic amino acids
  MISC_FEATURE (5)..(5): X is N or Q for amidated amino acids
  MISC_FEATURE (6)..(6): X is A or G
  MISC_FEATURE (7)..(7): X is D and E for acidic amino acids
  MISC_FEATURE (8)..(8): X is K, R or H for basic amino acids
  MISC_FEATURE (9)..(9): X is I, L or V
  MISC_FEATURE (10)..(10): X is D and E for acidic amino acids
  MISC_FEATURE (11)..(11): X is K, R or H for basic amino acids
  MISC_FEATURE (12)..(12): X is I, L or V
  MISC_FEATURE (13)..(13): X is D and E for acidic amino acids
  MISC_FEATURE (14)..(14): X is A or G
  MISC_FEATURE (15)..(15): X is A or G
  MISC_FEATURE (16)..(16): X is A or G
  MISC_FEATURE (17)..(17): X is C or S
  MISC_FEATURE (18)..(18): X is I, L or V
  MISC_FEATURE (19)..(19): X is K, R or H for basic amino acids
  MISC_FEATURE (20)..(20): X is I, L or V
  MISC_FEATURE (21)..(21): X is M or Nle
  MISC_FEATURE (22)..(22): X is A or G
  MISC_FEATURE (23)..(23): X is Tor S
  MISC_FEATURE (24)..(24): X is I, L or V
  MISC_FEATURE (25)..(25): X is F or P
  MISC_FEATURE (26)..(26): X is C or S
  MISC_FEATURE (27)..(27): X is C or S
  MISC_FEATURE (28)..(28): X is F, W or Y for aromatic amino acids
  MISC_FEATURE (29)..(29): X is A or G
  MISC_FEATURE (30)..(30): X is T or S

SEQ ID NO: 313 - protein, 27 aa, Artificial
  Completely synthesized peptide construct
DLKKNGERIEKVEGGGNITEIADLTQK

SEQ ID NO: 314 - protein, 27 aa, Artificial
  peptide construct
  MISC_FEATURE (1)..(1): X is D and E for acidic amino acids
  MISC_FEATURE (2)..(2): X is I, L or V
  MISC_FEATURE (3)..(3): X is I, L or V
  MISC_FEATURE (4)..(4): X is K, R or H for basic amino acids
  MISC_FEATURE (5)..(5): X is N or Q for amidated amino acids
  MISC_FEATURE (6)..(6): X is A or G
  MISC_FEATURE (7)..(7): X is D and E for acidic amino acids
  MISC_FEATURE (8)..(8): X is K, R or H for basic amino acids
  MISC_FEATURE (9)..(9): X is I, L or V
  MISC_FEATURE (10)..(10): X is D and E for acidic amino acids
  MISC_FEATURE (11)..(11): X is K,  R or H for basic amino acids
  MISC_FEATURE (12)..(12): X is I, L or V
  MISC_FEATURE (13)..(13): X is D and E for acidic amino acids
  MISC_FEATURE (14)..(14): X is A or G
  MISC_FEATURE (15)..(15): X is A or G
  MISC_FEATURE (16)..(16): X is A or G
  MISC_FEATURE (17)..(17): X is N or Q for amidated amino acids
  MISC_FEATURE (18)..(18): X is I, L or V
  MISC_FEATURE (19)..(19): X is T or S
  MISC_FEATURE (20)..(20): X is D and E for acidic amino acids
  MISC_FEATURE (21)..(21): X is I, L or V
  MISC_FEATURE (22)..(22): X is A or G
  MISC_FEATURE (23)..(23): X is D and E for acidic amino acids
  MISC_FEATURE (24)..(24): X is I, L or V
  MISC_FEATURE (25)..(25): X is T or S
  MISC_FEATURE (26)..(26): X is N or Q for amidated amino acids
  MISC_FEATURE (27)..(27): X is K, R or H for basic amino acids
XXXXXXXXXXXXXXXXXXXXXXXXXXX

SEQ ID NO: 315 - protein, 56 aa, Artificial
  Completely synthesized peptide construct
DLLKNGERIEKVEGGGNMYAMMIARFKMFPEVKEKGMAALPRLIAFTSEHSHFSLK

SEQ ID NO: 316 - protein, 56 aa, Artificial; identical to SEQ ID NO: 292
  peptide construct
  MISC_FEATURE (1)..(1): X is D and E for acidic amino acids
  MISC_FEATURE (2)..(2): X is I, L or V
  MISC_FEATURE (3)..(3): X is I, L or V
  MISC_FEATURE (4)..(4): X is K, R or H for basic amino acids
  MISC_FEATURE (5)..(5): X is N or Q for amidated amino acids
  MISC_FEATURE (6)..(6): X is A or G
  MISC_FEATURE (7)..(7): X is D and E for acidic amino acids
  MISC_FEATURE (8)..(8): X is K, R or H for basic amino acids
  MISC_FEATURE (9)..(9): X is I, L or V
  MISC_FEATURE (10)..(10): X is D and E for acidic amino acids
  MISC_FEATURE (11)..(11): X is K, R or H for basic amino acids
  MISC_FEATURE (12)..(12): X is I, L or V
  MISC_FEATURE (13)..(13): X is D and E for acidic amino acids
  MISC_FEATURE (14)..(14): X is A or G
  MISC_FEATURE (15)..(15): X is A or G
  MISC_FEATURE (16)..(16): X is A or G
  MISC_FEATURE (17)..(17): X is N or Q for amidated amino acids
  MISC_FEATURE (18)..(18): X is M or Nle
  MISC_FEATURE (19)..(19): X is F, W or Y for aromatic amino acids
  MISC_FEATURE (20)..(20): X is A or G
  MISC_FEATURE (21)..(21): X is M or Nle
  MISC_FEATURE (22)..(22): X is M or Nle
  MISC_FEATURE (23)..(23): X is I, L or V
  MISC_FEATURE (24)..(24): X is A or G
  MISC_FEATURE (25)..(25): X is K, R or H for basic amino acids
  MISC_FEATURE (26)..(26): X is F, W or Y for aromatic amino acids
  MISC_FEATURE (27)..(27): X is K, R or H for basic amino acids
  MISC_FEATURE (28)..(28): X is M or Nle
  MISC_FEATURE (29)..(29): X is F, W or Y for aromatic amino acids
  MISC_FEATURE (30)..(30): X is F or P
  MISC_FEATURE (31)..(31): X is D and E for acidic amino acids
  MISC_FEATURE (32)..(32): X is I, L or V
  MISC_FEATURE (33)..(33): X is K, R or H for basic amino acids
  MISC_FEATURE (34)..(34): X is D and E for acidic amino acids
  MISC_FEATURE (35)..(35): X is K, R or H for basic amino acids
  MISC_FEATURE (36)..(36): X is A or G
  MISC_FEATURE (37)..(37): X is M or Nle
  MISC_FEATURE (38)..(38): X is A or G
  MISC_FEATURE (39)..(39): X is A or G
  MISC_FEATURE (40)..(40): X is I, L or V
  MISC_FEATURE (41)..(41): X is F or P
  MISC_FEATURE (42)..(42): X is K, R or H for basic amino acids
  MISC_FEATURE (43)..(43): X is I, L or V
  MISC_FEATURE (44)..(44): X is I, L or V
  MISC_FEATURE (45)..(45): X is A or G
  MISC_FEATURE (46)..(46): X is F, W or Y for aromatic amino acids
  MISC_FEATURE (47)..(47): X is T or S
  MISC_FEATURE (48)..(48): X is C or S
  MISC_FEATURE (49)..(49): X is D and E for acidic amino acids
  MISC_FEATURE (50)..(50): X is K, R or H for basic amino acids
  MISC_FEATURE (51)..(51): X is C or S
  MISC_FEATURE (52)..(52): X is K, R or H for basic amino acids
  MISC_FEATURE (53)..(53): X is F, W or Y for aromatic amino acids
  MISC_FEATURE (54)..(54): X is C or S
  MISC_FEATURE (55)..(55): X is I, L or V
  MISC_FEATURE (56)..(56): X is K, R or H for basic amino acids

SEQ ID NO: 317 - protein, 50 aa, Artificial [sequence omitted]

SEQ ID NO: 318 - protein, 50 aa, Artificial
  peptide construct
  MISC_FEATURE (1)..(1): X is D and E for acidic amino acids
  MISC_FEATURE (2)..(2): X is I, L or V
  MISC_FEATURE (3)..(3): X is I, L or V
  MISC_FEATURE (4)..(4): X is K, R or H for basic amino acids
  MISC_FEATURE (5)..(5): X is N or Q for amidated amino acids
  MISC_FEATURE (6)..(6): X is A or G
  MISC_FEATURE (7)..(7): X is D and E for acidic amino acids
  MISC_FEATURE (8)..(8): X is K, R or H for basic amino acids
  MISC_FEATURE (9)..(9): X is I, L or V
  MISC_FEATURE (10)..(10): X is D and E for acidic amino acids
  MISC_FEATURE (11)..(11): X is K, R or H for basic amino acids
  MISC_FEATURE (12)..(12): X is I, L or V
  MISC_FEATURE (13)..(13): X is D and E for acidic amino acids
  MISC_FEATURE (14)..(14): X is A or G
  MISC_FEATURE (15)..(15): X is A or G
  MISC_FEATURE (16)..(16): X is A or G
  MISC_FEATURE (17)..(17): X is I, L or V
  MISC_FEATURE (18)..(18): X is A or G
  MISC_FEATURE (19)..(19): X is K, R or H for basic amino acids
  MISC_FEATURE (20)..(20): X is F, W or Y for aromatic amino acids
  MISC_FEATURE (21)..(21): X is K, R or H for basic amino acids
  MISC_FEATURE (22)..(22): X is M or Nle
  MISC_FEATURE (23)..(23): X is F, W or Y for aromatic amino acid
  MISC_FEATURE (24)..(24): X is F or P
  MISC_FEATURE (25)..(25): X is D and E for acidic amino acids
  MISC_FEATURE (26)..(26): X is I, L or V
  MISC_FEATURE (27)..(27): X is K, R or H for basic amino acids
  MISC_FEATURE (28)..(28): X is D and E for acidic amino acids
  MISC_FEATURE (29)..(29): X is K, R or H for basic amino acids
  MISC_FEATURE (30)..(30): X is A or G
  MISC_FEATURE (31)..(31): X is M or Nle
  MISC_FEATURE (32)..(32): X is A or G
  MISC_FEATURE (33)..(33): X is A or G
  MISC_FEATURE (34)..(34): X is I, L or V
  MISC_FEATURE (35)..(35): X is F or P
  MISC_FEATURE (36)..(36): X is K, R or H for basic amino acids
  MISC_FEATURE (37)..(37): X is I, L or V
  MISC_FEATURE (38)..(38): X is I, L or V
  MISC_FEATURE (39)..(39): X is A or G
  MISC_FEATURE (40)..(40): X is F, W or Y for aromatic amino acids
  MISC_FEATURE (41)..(41): X is T or S
  MISC_FEATURE (42)..(42): X is C or S
  MISC_FEATURE (43)..(43): X is D and E for acidic amino acids
  MISC_FEATURE (44)..(44): X is K, R or H for basic amino acids
  MISC_FEATURE (45)..(45): X is C or S
  MISC_FEATURE (46)..(46): X is K, R or H for basic amino acids
  MISC_FEATURE (47)..(47): X is F, W or Y for aromatic amino acids
  MISC_FEATURE (48)..(48): X is C or S
  MISC_FEATURE (49)..(49): X is I, L or V
  MISC_FEATURE (50)..(50): X is K, R or H for basic amino acids
XXXXXXXXXXXXXXXXXXXXXXXXXXXXXXXXXXXXXXXXXXXXXXXXXX

SEQ ID NO: 319 - protein, 36 aa, Artificial
  Completely synthesized peptide construct
DLLKNGERIEKVEGGGSRLSKVAPVIKARMMEYGTT

SEQ ID NO: 320 - protein, 36 aa, Artificial; identical to SEQ ID NO: 164
  peptide construct
  MISC_FEATURE (1)..(1): X is D and E for acidic amino acids
  MISC_FEATURE (2)..(2): X is I, L or V
  MISC_FEATURE (3)..(3): X is I, L or V
  MISC_FEATURE (4)..(4): X is K, R or H for basic amino acids
  MISC_FEATURE (5)..(5): X is N or Q for amidated amino acids
  MISC_FEATURE (6)..(6): X is A or G
  MISC_FEATURE (7)..(7): X is D and E for acid amino acids
  MISC_FEATURE (8)..(8): X is K, R or H for basic amino acids
  MISC_FEATURE (9)..(9): X is I, L or V
  MISC_FEATURE (10)..(10): X is D and E for acidic amino acids
  MISC_FEATURE (11)..(11): X is K, R or H for basic amino acids
  MISC_FEATURE (12)..(12): X is I, L or V
  MISC_FEATURE (13)..(13): X is D and E for acidic amino acids
  MISC_FEATURE (14)..(14): X is A or G
  MISC_FEATURE (15)..(15): X is A or G
  MISC_FEATURE (16)..(16): X is A or G
  MISC_FEATURE (17)..(17): X is C or S
  MISC_FEATURE (18)..(18): X is K, R or H for basic amino acids
  MISC_FEATURE (19)..(19): X is I, L or V
  MISC_FEATURE (20)..(20): X is C or S
  MISC_FEATURE (21)..(21): X is K, R or H for basic amino acids
  MISC_FEATURE (22)..(22): X is I, L or V
  MISC_FEATURE (23)..(23): X is A or G
  MISC_FEATURE (24)..(24): X is F or P
  MISC_FEATURE (25)..(25): X is I, L or V
  MISC_FEATURE (26)..(26): X is I, L or V
  MISC_FEATURE (27)..(27): X is K, R or H for basic amino acids
  MISC_FEATURE (28)..(28): X is A or G
  MISC_FEATURE (29)..(29): X is K, R or H for basic amino acids
  MISC_FEATURE (30)..(30): X is M or Nle
  MISC_FEATURE (31)..(31): X is M or Nle
  MISC_FEATURE (32)..(32): X is D and E for acidic amino acids
  MISC_FEATURE (33)..(33): X is F, W or Y for aromatic amino acids
  MISC_FEATURE (34)..(34): X is A or G
  MISC_FEATURE (35)..(35): X is T or S
  MISC_FEATURE (36)..(36): X is T or S

SEQ ID NO: 321 - protein, 35 aa, Artificial
  Completely synthesized peptide construct
DLKKNGERIEKVEGGGIPPSLRYLEDEERMSRLSK

SEQ ID NO: 322 - protein, 34 aa, Artificial; identical to SEQ ID NO: 77
  peptide construct
  MISC_FEATURE (1)..(1): X is D and E for acidic amino acids
  MISC_FEATURE (2)..(2): X is I, L or V
  MISC_FEATURE (3)..(3): X is I, L or V
  MISC_FEATURE (4)..(4): X is K, R or H for basic amino acids
  MISC_FEATURE (5)..(5): X is N or Q for amidated amino acids
  MISC_FEATURE (6)..(6): X is A or G
  MISC_FEATURE (7)..(7): X is D and E for acidic amino acids
  MISC_FEATURE (8)..(8): X is K, R or H for basic amino acids
  MISC_FEATURE (9)..(9): X is I, L or V
  MISC_FEATURE (10)..(10): X is D and E for acidic amino acids
  MISC_FEATURE (11)..(11): X is K, R or H for basic amino acids
  MISC_FEATURE (12)..(12): X is I, L or V
  MISC_FEATURE (13)..(13): X is D and E for acidic amino acids
  MISC_FEATURE (14)..(14): X is A or G
  MISC_FEATURE (15)..(15): X is A or G
  MISC_FEATURE (16)..(16): X is A or G
  MISC_FEATURE (17)..(17): X is I, L or V
  MISC_FEATURE (18)..(18): X is F or P
  MISC_FEATURE (19)..(19): X is F or P
  MISC_FEATURE (20)..(20): X is C or S
  MISC_FEATURE (21)..(21): X is I, L or V
  MISC_FEATURE (22)..(22): X is K, R or H for basic amino acids
  MISC_FEATURE (23)..(23): X is F, W or Y for aromatic amino acids
  MISC_FEATURE (24)..(24): X is D and E for acidic amino acids
  MISC_FEATURE (25)..(25): X is D and E for acidic amino acids
  MISC_FEATURE (26)..(26): X is D and E for acidic amino acids
  MISC_FEATURE (27)..(27): X is D and E for acidic amino acids
  MISC_FEATURE (28)..(28): X is K, R or H for basic amino acids
  MISC_FEATURE (29)..(29): X is M or Nle
  MISC_FEATURE (30)..(30): X is C or S
  MISC_FEATURE (31)..(31): X is K, R or H for basic amino acids
  MISC_FEATURE (32)..(32): X is I, L or V
  MISC_FEATURE (33)..(33): X is C or S
  MISC_FEATURE (34)..(34): X is K, R or H for basic amino acids

SEQ ID NO: 323 - protein, 35 aa, Artificial
  Completely synthesized peptide construct
DLKNGERIEKVEGGGNTNMFTYEIAPVFVLLEYVT

SEQ ID NO: 324 - protein, 36 aa, Artificial; identical to SEQ ID NO: 164
  peptide construct
  MISC_FEATURE (1)..(1): X is D and E for acidic amino acids
  MISC_FEATURE (2)..(2): X is I, L or V
  MISC_FEATURE (3)..(3): X is I, L or V
  MISC_FEATURE (4)..(4): X is K, R or H for basic amino acids
  MISC_FEATURE (5)..(5): X is N or Q for amidated amino acids
  MISC_FEATURE (6)..(6): X is A or G
  MISC_FEATURE (7)..(7): X is D and E for acidic amino acids
  MISC_FEATURE (8)..(8): X is K,  R or H for basic amino acids
  MISC_FEATURE (9)..(9): X is I, L or V
  MISC_FEATURE (10)..(10): X is D and E for acidic amino acids
  MISC_FEATURE (11)..(11): X is K, R or H for basic amino acids
  MISC_FEATURE (12)..(12): X is I, L or V
  MISC_FEATURE (13)..(13): X is D and E for acidic amino acids
  MISC_FEATURE (14)..(14): X is A or G
  MISC_FEATURE (15)..(15): X is A or G
  MISC_FEATURE (16)..(16): X is A or G
  MISC_FEATURE (17)..(17): X is N or Q for amidated amino acids
  MISC_FEATURE (18)..(18): X is T or S
  MISC_FEATURE (19)..(19): X is N or Q for amidated amino acids
  MISC_FEATURE (20)..(20): X is M or Nle
  MISC_FEATURE (21)..(21): X is F, W or Y for aromatic amino acids
  MISC_FEATURE (22)..(22): X is T or S
  MISC_FEATURE (23)..(23): X is F, W or Y for aromatic amino acids
  MISC_FEATURE (24)..(24): X is D and E for acidic amino acids
  MISC_FEATURE (25)..(25): X is I, L or V
  MISC_FEATURE (26)..(26): X is A or G
  MISC_FEATURE (27)..(27): X is F or P
  MISC_FEATURE (28)..(28): X is I, L or V
  MISC_FEATURE (29)..(29): X is F, W or Y for aromatic amino acids
  MISC_FEATURE (30)..(30): X is I, L or V
  MISC_FEATURE (31)..(31): X is I, L or V
  MISC_FEATURE (32)..(32): X is I, L or V
  MISC_FEATURE (33)..(33): X is D and E for acidic amino acids
  MISC_FEATURE (34)..(34): X is F, W or Y for aromatic amino acids
  MISC_FEATURE (35)..(35): X is I, L or V
  MISC_FEATURE (36)..(36): X is T or S

SEQ ID NO: 325 - protein, 31 aa, Artificial
  Completely synthesized peptide construct
DLLKNGERIEKVEGGGFKADEKKFWGKYLYE

SEQ ID NO: 326 - protein, 31 aa, Artificial; identical to SEQ ID NO: 123
  peptide construct
  MISC_FEATURE (1)..(1): X is D and E for acidic amino acids
  MISC_FEATURE (2)..(2): X is I, L or V
  MISC_FEATURE (3)..(3): X is I, L or V
  MISC_FEATURE (4)..(4): X is K, R or H for basic amino acids
  MISC_FEATURE (5)..(5): X is N or Q for amidated amino acids
  MISC_FEATURE (6)..(6): X is A or G
  MISC_FEATURE (7)..(7): X is D and E for acidic amino acids
  MISC_FEATURE (8)..(8): X is K, R or H for basic amino acids
  MISC_FEATURE (9)..(9): X is I, L or V
  MISC_FEATURE (10)..(10): X is D and E for acidic amino acids
  MISC_FEATURE (11)..(11): X is K, R or H for basic amino acids
  MISC_FEATURE (12)..(12): X is I, L or V
  MISC_FEATURE (13)..(13): X is D and E for acidic amino acids
  MISC_FEATURE (14)..(14): X is A or G
  MISC_FEATURE (15)..(15): X is A or G
  MISC_FEATURE (16)..(16): X is A or G
  MISC_FEATURE (17)..(17): X is F, Wor Y for aromatic amino acids
  MISC_FEATURE (18)..(18): X is K, R or H for basic amino acids
  MISC_FEATURE (19)..(19): X is A or G
  MISC_FEATURE (20)..(20): X is D and E for acidic amino acids
  MISC_FEATURE (21)..(21): X is D and E for acidic amino acids
  MISC_FEATURE (22)..(22): X is K, R or  H for basic amino acids
  MISC_FEATURE (23)..(23): X is K, R or H for basic amino acids
  MISC_FEATURE (24)..(24): X is F, W or Y for aromatic amino acids
  MISC_FEATURE (25)..(25): X is F,  W or Y for aromatic amino acids
  MISC_FEATURE (26)..(26): X is A or G
  MISC_FEATURE (27)..(27): X is K, R or H for basic amino acids
  MISC_FEATURE (28)..(28): X is F,  W or Y for aromatic amino acids
  MISC_FEATURE (29)..(29): X is I, L or V
  MISC_FEATURE (30)..(30): X is F, W or Y for aromatic amino acids
  MISC_FEATURE (31)..(31): X is D and E for acidic amino acids

SEQ ID NO: 327 - protein, 31 aa, Artificial
  Completely synthesized peptide construct
DLKKNGERIEKVEGGGSHLVEALYLVCGERG

SEQ ID NO: 328 - protein, 30 aa, Artificial; identical to SEQ ID NO: 56
  peptide construct
  MISC_FEATURE (1)..(1): X is D and E for acidic amino acids
  MISC_FEATURE (2)..(2): X is I, L or V
  MISC_FEATURE (3)..(3): X is I, L or V
  MISC_FEATURE (4)..(4): X is K, R or H for basic amino acids
  MISC_FEATURE (5)..(5): X is N or Q for amidated amino acids
  MISC_FEATURE (6)..(6): X is A or G
  MISC_FEATURE (7)..(7): X is D and E for acidic amino acids
  MISC_FEATURE (8)..(8): X is K,  R or H for basic amino acids
  MISC_FEATURE (9)..(9): X is I, L or V
  MISC_FEATURE (10)..(10): X is D and E for acidic amino acids
  MISC_FEATURE (11)..(11): X is K, R or H for basic amino acids
  MISC_FEATURE (12)..(12): X is I, L or V
  MISC_FEATURE (13)..(13): X is D and E for acidic amino acids
  MISC_FEATURE (14)..(14): X is A or G
  MISC_FEATURE (15)..(15): X is A or G
  MISC_FEATURE (16)..(16): X is A or G
  MISC_FEATURE (17)..(17): X is C or S
  MISC_FEATURE (18)..(18): X is K, R or H for basic amino acids
  MISC_FEATURE (19)..(19): X is I, L or V
  MISC_FEATURE (20)..(20): X is I, L or V
  MISC_FEATURE (21)..(21): X is D and E for acidic amino acids
  MISC_FEATURE (22)..(22): X is A or G
  MISC_FEATURE (23)..(23): X is I, L or V
  MISC_FEATURE (24)..(24): X is F, W or Y for aromatic amino acids
  MISC_FEATURE (25)..(25): X is I, L or V
  MISC_FEATURE (26)..(26): X is C or S
  MISC_FEATURE (27)..(27): X is A or G
  MISC_FEATURE (28)..(28): X is D and E for acidic amino acids
  MISC_FEATURE (29)..(29): X is K, R or H for basic amino acids
  MISC_FEATURE (30)..(30): X is A or G

SEQ ID NO: 329 - protein, 39 aa, Artificial
  Completely synthesized peptide construct
DLKNGERIEKVEGGGVLGGGCALLRCIPALDSLTPANED

SEQ ID NO: 330 - protein, 40 aa, Artificial; identical to SEQ ID NO: 52
  peptide construct
  MISC_FEATURE (1)..(1): X is D and E for acidic amino acids
  MISC_FEATURE (2)..(2): X is I, L or V
  MISC_FEATURE (3)..(3): X is I, L or V
  MISC_FEATURE (4)..(4): X is K, R or H for basic amino acids
  MISC_FEATURE (5)..(5): X is N or Q for amidated amino acids
  MISC_FEATURE (6)..(6): X is A or G
  MISC_FEATURE (7)..(7): X is D and E for acidic amino acids
  MISC_FEATURE (8)..(8): X is K, R or H for basic amino acids
  MISC_FEATURE (9)..(9): X is I, L or V
  MISC_FEATURE (10)..(10): X is D and E for acidic amino acids
  MISC_FEATURE (11)..(11): X is K, R or H for basic amino acids
  MISC_FEATURE (12)..(12): X is I, L or V
  MISC_FEATURE (13)..(13): X is D and E for acidic amino acids
  MISC_FEATURE (14)..(14): X is A or G
  MISC_FEATURE (15)..(15): X is A or G
  MISC_FEATURE (16)..(16): X is A or G
  MISC_FEATURE (17)..(17): X is I, L or V
  MISC_FEATURE (18)..(18): X is I, L or V
  MISC_FEATURE (19)..(19): X is A or G
  MISC_FEATURE (20)..(20): X is A or G
  MISC_FEATURE (21)..(21): X is A or G
  MISC_FEATURE (22)..(22): X is C or S
  MISC_FEATURE (23)..(23): X is A or G
  MISC_FEATURE (24)..(24): X is I, L or V
  MISC_FEATURE (25)..(25): X is I, L or V
  MISC_FEATURE (26)..(26): X is K, R or H for basic amino acids
  MISC_FEATURE (27)..(27): X is C or S
  MISC_FEATURE (28)..(28): X is I, L or V
  MISC_FEATURE (29)..(29): X is  F or P
  MISC_FEATURE (30)..(30): X is A or G
  MISC_FEATURE (31)..(31): X is I, L or V
  MISC_FEATURE (32)..(32): X is D and E for acidic amino acids
  MISC_FEATURE (33)..(33): X is C or S
  MISC_FEATURE (34)..(34): X is I, L or V
  MISC_FEATURE (35)..(35): X is T or S
  MISC_FEATURE (36)..(36): X is F or P
  MISC_FEATURE (37)..(37): X is A or G
  MISC_FEATURE (38)..(38): X is N or Q for amidated amino acids
  MISC_FEATURE (39)..(39): X is D and E for acidic amino acids
  MISC_FEATURE (40)..(40): X is D and E for acidic amino acids

SEQ ID NO: 331 - protein, 44 aa, Artificial
  Completely synthesized peptide construct
DLLKNGERIEKVEGGGEACVTSWLWSGEGAVFYRVDLHFINLGT

SEQ ID NO: 332 - protein, 44 aa, Artificial; identical to SEQ ID NO: 294
  peptide construct
  MISC_FEATURE (1)..(1): X is D and E for acidic amino acids
  MISC_FEATURE (2)..(2): X is I, L or V
  MISC_FEATURE (3)..(3): X is I, L or V
  MISC_FEATURE (4)..(4): X is F, W or Y for aromatic amino acids
  MISC_FEATURE (5)..(5): X is N or Q for amidated amino acids
  MISC_FEATURE (6)..(6): X is A or G
  MISC_FEATURE (7)..(7): X is D and E for acidic amino acids
  MISC_FEATURE (8)..(8): X is K, R or H for basic amino acids
  MISC_FEATURE (9)..(9): X is I, L or V
  MISC_FEATURE (10)..(10): X is D and E for acidic amino acids
  MISC_FEATURE (11)..(11): X is K, R or H for basic amino acids
  MISC_FEATURE (12)..(12): X is I, L or V
  MISC_FEATURE (13)..(13): X is D and E for acidic amino acids
  MISC_FEATURE (14)..(14): X is A or G
  MISC_FEATURE (15)..(15): X is A or G
  MISC_FEATURE (16)..(16): X is A or G
  MISC_FEATURE (17)..(17): X is D and E for acidic amino acids
  MISC_FEATURE (18)..(18): X is A or G
  MISC_FEATURE (19)..(19): X is C or S
  MISC_FEATURE (20)..(20): X is I, L or V
  MISC_FEATURE (21)..(21): X is T or S
  MISC_FEATURE (22)..(22): X is C or S
  MISC_FEATURE (23)..(23): X is F, W or Y for aromatic amino acids
  MISC_FEATURE (24)..(24): X is I, L or V
  MISC_FEATURE (25)..(25): X is F, W or Y for aromatic amino acids
  MISC_FEATURE (26)..(26): X is C or S
  MISC_FEATURE (27)..(27): X is A or G
  MISC_FEATURE (28)..(28): X is D and E for acidic amino acids
  MISC_FEATURE (29)..(29): X is A or G
  MISC_FEATURE (30)..(30): X is A or G
  MISC_FEATURE (31)..(31): X is I, L or V
  MISC_FEATURE (32)..(32): X is F, W or Y for aromatic amino acids
  MISC_FEATURE (33)..(33): X is F, W or Y for aromatic amino acids
  MISC_FEATURE (34)..(34): X is K, R or H for basic amino acids
  MISC_FEATURE (35)..(35): X is I, L or V
  MISC_FEATURE (36)..(36): X is D and  E for acidic amino acids
  MISC_FEATURE (37)..(37): X is I, L or V
  MISC_FEATURE (38)..(38): X is K, R or H for basic amino acids
  MISC_FEATURE (39)..(39): X is F, W or Y for aromatic amino acids
  MISC_FEATURE (40)..(40): X is I, L or V
  MISC_FEATURE (41)..(41): X is N or Q for amidated amino acids
  MISC_FEATURE (42)..(42): X is I, L or V
  MISC_FEATURE (43)..(43): X is A or G
  MISC_FEATURE (44)..(44): X is T or S

SEQ ID NO: 333 - protein, 36 aa, Artificial
  Completely synthesized peptide construct
DLKNGERIEKVEGGGMDFWCVEHDRPPPATPTSLTT

SEQ ID NO: 334 - protein, 37 aa, Artificial; identical to SEQ ID NO: 151
  peptide construct
  MISC_FEATURE (1)..(1): X is D and E for acidic amino acids
  MISC_FEATURE (2)..(2): X is I, L or V
  MISC_FEATURE (3)..(3): X is I, L or V
  MISC_FEATURE (4)..(4): X is K,  R or H for basic amino acids
  MISC_FEATURE (5)..(5): X is N or Q for amidated amino acids
  MISC_FEATURE (6)..(6): X is A or G
  MISC_FEATURE (7)..(7): X is D and E for acidic amino acids
  MISC_FEATURE (8)..(8): X is K, R or H for basic amino acids
  MISC_FEATURE (9)..(9): X is I, L or V
  MISC_FEATURE (10)..(10): X is D and E for acidic amino acids
  MISC_FEATURE (11)..(11): X is K, R or H for basic amino acids
  MISC_FEATURE (12)..(12): X is I, L or V
  MISC_FEATURE (13)..(13): X is D and E for acidic amino acids
  MISC_FEATURE (14)..(14): X is A or G
  MISC_FEATURE (15)..(15): X is A or G
  MISC_FEATURE (16)..(16): X is A or G
  MISC_FEATURE (17)..(17): X is M or Nle
  MISC_FEATURE (18)..(18): X is D and E for acidic amino acids
  MISC_FEATURE (19)..(19): X is F, W or Y for aromatic amino acids
  MISC_FEATURE (20)..(20): X is F, W or Y for aromatic amino acids
  MISC_FEATURE (21)..(21): X is C or S
  MISC_FEATURE (22)..(22): X is I, L or V
  MISC_FEATURE (23)..(23): X is D and E for acidic amino acids
  MISC_FEATURE (24)..(24): X is K, R or H for basic amino acids
  MISC_FEATURE (25)..(25): X is D and E for acidic amino acids
  MISC_FEATURE (26)..(26): X is K, R or H for basic amino acids
  MISC_FEATURE (27)..(27): X is F or P
  MISC_FEATURE (28)..(28): X is F or P
  MISC_FEATURE (29)..(29): X is F or P
  MISC_FEATURE (30)..(30): X is A or G
  MISC_FEATURE (31)..(31): X is T or S
  MISC_FEATURE (32)..(32): X is F or P
  MISC_FEATURE (33)..(33): X  is T or S
  MISC_FEATURE (34)..(34): X is C or S
  MISC_FEATURE (35)..(35): X is I, L or V
  MISC_FEATURE (36)..(36): X is T or S
  MISC_FEATURE (37)..(37): X is T or S

SEQ ID NO: 335 - protein, 36 aa, Artificial
  Completely synthesized peptide construct
DLLKNGERIEKVEGGGNMYAMMIARFKMFPEVKEKG

SEQ ID NO: 336 - protein, 36 aa, Artificial; identical to SEQ ID NO: 164
  peptide construct
  MISC_FEATURE (1)..(1): X is D and E for acidic amino acids
  MISC_FEATURE (2)..(2): X is I, L or V
  MISC_FEATURE (3)..(3): X is I, L or V
  MISC_FEATURE (4)..(4): X is K, R or H for basic amino acids
  MISC_FEATURE (5)..(5): X is N or Q for amidated amino acids
  MISC_FEATURE (6)..(6): X  is A or G
  MISC_FEATURE (7)..(7): X is D and E for acidic amino acids
  MISC_FEATURE (8)..(8): X is K, R or H for basic amino acids
  MISC_FEATURE (9)..(9): X is I, L or V
  MISC_FEATURE (10)..(10): X is D and E for acidic amino acids
  MISC_FEATURE (11)..(11): X is K, R or H for basic amino acids
  MISC_FEATURE (12)..(12): X is I, L or V
  MISC_FEATURE (13)..(13): X is D and E for acidic amino acids
  MISC_FEATURE (14)..(14): X is A or G
  MISC_FEATURE (15)..(15): X is A or G
  MISC_FEATURE (16)..(16): X is A or G
  MISC_FEATURE (17)..(17): X is N or Q for amidated amino acids
  MISC_FEATURE (18)..(18): X is M or Nle
  MISC_FEATURE (19)..(19): X is F, W or Y for aromatic amino acids
  MISC_FEATURE (20)..(20): X is A or G
  MISC_FEATURE (21)..(21): X is M or Nle
  MISC_FEATURE (22)..(22): X is M or Nle
  MISC_FEATURE (23)..(23): X is I, L or V
  MISC_FEATURE (24)..(24): X is A or G
  MISC_FEATURE (25)..(25): X is K, R or H for basic amino acids
  MISC_FEATURE (26)..(26): X  is F, W or Y for aromatic amino acids
  MISC_FEATURE (27)..(27): X is K, R or H for basic amino acids
  MISC_FEATURE (28)..(28): X is M or Nle
  MISC_FEATURE (29)..(29): X is F, W or Y for aromatic amino acids
  MISC_FEATURE (30)..(30): X is F or P
  MISC_FEATURE (31)..(31): X is D and E for acidic amino acids
  MISC_FEATURE (32)..(32): X is I, L or V
  MISC_FEATURE (33)..(33): X is K, R or H for basic amino acids
  MISC_FEATURE (34)..(34): X is D and E for acidic amino acids
  MISC_FEATURE (35)..(35): X is K, R or H for basic amino acids
  MISC_FEATURE (36)..(36): X is A or G

SEQ ID NO: 337 - protein, 49 aa, Artificial
  Completely synthesized peptide construct
DLLKNGERIEKVEGGGNMYAMMIARFKMFPEVKEKGMAALPRLIAFTSE

SEQ ID NO: 338 - protein, 49 aa, Artificial
  peptide construct
  MISC_FEATURE (1)..(1): X is D and E for acidic amino acids
  MISC_FEATURE (2)..(2): X is I, L or V
  MISC_FEATURE (3)..(3): X is I, L or V
  MISC_FEATURE (4)..(4): X is K, R or H for basic amino acids
  MISC_FEATURE (5)..(5): X is N or Q for amidated amino acids
  MISC_FEATURE (6)..(6): X is A or G
  MISC_FEATURE (7)..(7): X is D and E for acidic amino acids
  MISC_FEATURE (8)..(8): X is K, R or H for basic amino acids
  MISC_FEATURE (9)..(9): X is I, L or V
  MISC_FEATURE (10)..(10): X is D and E for acidic amino acids
  MISC_FEATURE (11)..(11): X is K, R or H for basic amino acids
  MISC_FEATURE (12)..(12): X is I, L or V
  MISC_FEATURE (13)..(13): X is D and E for acidic amino acids
  MISC_FEATURE (14)..(14): X is A or G
  MISC_FEATURE (15)..(15): X is A or G
  MISC_FEATURE (16)..(16): X is A or G
  MISC_FEATURE (17)..(17): X is N or Q for amidated amino acids
  MISC_FEATURE (18)..(18): X is M or Nle
  MISC_FEATURE (19)..(19): X is F, W or Y for aromatic amino acids
  MISC_FEATURE (20)..(20): X is A or G
  MISC_FEATURE (21)..(21): X is M or Nle
  MISC_FEATURE (22)..(22): X is M or Nle
  MISC_FEATURE (23)..(23): X is I, L or V
  MISC_FEATURE (24)..(24): X is A or G
  MISC_FEATURE (25)..(25): X is K, R or H for basic amino acids
  MISC_FEATURE (26)..(26): X is F, W or Y for aromatic amino acids
  MISC_FEATURE (27)..(27): X is K, R or H for basic amino acids
  MISC_FEATURE (28)..(28): X is M or Nle
  MISC_FEATURE (29)..(29): X is F, W or Y for aromatic amino acids
  MISC_FEATURE (30)..(30): X is F or P
  MISC_FEATURE (31)..(31): X is D and E for acidic amino acids
  MISC_FEATURE (32)..(32): X is I, L or V
  MISC_FEATURE (33)..(33): X is K, R or H for basic amino acids
  MISC_FEATURE (34)..(34): X is D and E for acidic amino acids
  MISC_FEATURE (35)..(35): X is K, R or H for basic amino acids
  MISC_FEATURE (36)..(36): X is A or G
  MISC_FEATURE (37)..(37): X is M or Nle
  MISC_FEATURE (38)..(38): X is A or G
  MISC_FEATURE (39)..(39): X is A or G
  MISC_FEATURE (40)..(40): X is I, L or V
  MISC_FEATURE (41)..(41): X is F or P
  MISC_FEATURE (42)..(42): X is K, R or H for basic amino acids
  MISC_FEATURE (43)..(43): X is I, L or V
  MISC_FEATURE (44)..(44): X is I, L or V
  MISC_FEATURE (45)..(45): X is A or G
  MISC_FEATURE (46)..(46): X is F,  W or Y for aromatic amino acids
  MISC_FEATURE (47)..(47): X is T or S
  MISC_FEATURE (48)..(48): X is C or S
  MISC_FEATURE (49)..(49): X is D and E for acidic amino acids
XXXXXXXXXXXXXXXXXXXXXXXXXXXXXXXXXXXXXXXXXXXXXXXXX

SEQ ID NO: 339 - protein, 29 aa, Artificial
  Completely synthesized peptide construct
DLLKNGERIEKVEGGGIAFTSEHSHFSLK

SEQ ID NO: 340 - protein, 29 aa, Artificial
  peptide construct
  MISC_FEATURE (1)..(1): X is D and E for acidic amino acids
  MISC_FEATURE (2)..(2): X is I, L or V
  MISC_FEATURE (3)..(3): X is I, L or V
  MISC_FEATURE (4)..(4): X is K, R or H for basic amino acids
  MISC_FEATURE (5)..(5): X is N or Q for amidateda mino acids
  MISC_FEATURE (6)..(6): X is A or G
  MISC_FEATURE (7)..(7): X is D and E for acidic amino acids
  MISC_FEATURE (8)..(8): X is K, R or H for basic amino acids
  MISC_FEATURE (9)..(9): X is I, L or V
  MISC_FEATURE (10)..(10): X is D and E for acidic amino acids
  MISC_FEATURE (11)..(11): X is K, R or H for basic amino acids
  MISC_FEATURE (12)..(12): X is I, L or V
  MISC_FEATURE (13)..(13): X is D and E for acidic amino acids
  MISC_FEATURE (14)..(14): X is A or G
  MISC_FEATURE (15)..(15): X is A or G
  MISC_FEATURE (16)..(16): X is A or G
  MISC_FEATURE (17)..(17): X is I, L or V
  MISC_FEATURE (18)..(18): X is A or G
  MISC_FEATURE (19)..(19): X is F, W or Y for aromatic amino acids
  MISC_FEATURE (20)..(20): X is T or S
  MISC_FEATURE (21)..(21): X is C or S
  MISC_FEATURE (22)..(22): X is D and E for acidic amino acids
  MISC_FEATURE (23)..(23): X is K,  R or H for basic amino acids
  MISC_FEATURE (24)..(24): X is C or S
  MISC_FEATURE (25)..(25): X is K, R or H for basic amino acids
  MISC_FEATURE (26)..(26): X is F, W or Y for aromatic amino acids
  MISC_FEATURE (27)..(27): X is C or S
  MISC_FEATURE (28)..(28): X is I, L or V
  MISC_FEATURE (29)..(29): X is K,R or H for basic amino acids
XXXXXXXXXXXXXXXXXXXXXXXXXXXXX

SEQ ID NO: 341 - protein, 37 aa, Artificial
  Completely synthesized peptide construct
DLLKNGERIEKVEGGGMDFWCVEHDRPPPATPTSLTT

SEQ ID NO: 342 - protein, 37 aa, Artificial; identical to SEQ ID NO: 151
  peptide construct
  MISC_FEATURE (1)..(1): X is D and E for acidic amino acids
  MISC_FEATURE (2)..(2): X is I, L or V
  MISC_FEATURE (3)..(3): X is I, L or V
  MISC_FEATURE (4)..(4): X is K, R or H for basic amino acids
  MISC_FEATURE (5)..(5): X is N or Q for amidated amino acids
  MISC_FEATURE (6)..(6): X is A or G
  MISC_FEATURE (7)..(7): X is D and E for acidic amino acids
  MISC_FEATURE (8)..(8): X is K, R or H for basic amino acids
  MISC_FEATURE (9)..(9): X is I, L or V
  MISC_FEATURE (10)..(10): X is D and E for acidic amino acids
  MISC_FEATURE (11)..(11): X is K, R or H for basic amino acids
  MISC_FEATURE (12)..(12): X is I, L or V
  MISC_FEATURE (13)..(13): X is D and E for acidic amino acids
  MISC_FEATURE (14)..(14): X is A or G
  MISC_FEATURE (15)..(15): X is A or G
  MISC_FEATURE (16)..(16): X is A or G
  MISC_FEATURE (17)..(17): X is M or Nle
  MISC_FEATURE (18)..(18): X is D and E for acidic amino acids
  MISC_FEATURE (19)..(19): X is F, W or Y for aromatic amino acids
  MISC_FEATURE (20)..(20): X is F, W or Y for aromatic amino acids
  MISC_FEATURE (21)..(21): X is C or S
  MISC_FEATURE (22)..(22): X is I, L or V
  MISC_FEATURE (23)..(23): X is D and  E for acidic amino acids
  MISC_FEATURE (24)..(24): X is K, R or H for basic amino acids
  MISC_FEATURE (25)..(25): X is D and E for acidic amino acids
  MISC_FEATURE (26)..(26): X is K, R or H for basic amino acids
  MISC_FEATURE (27)..(27): X is F  or P
  MISC_FEATURE (28)..(28): X is F  or P
  MISC_FEATURE (29)..(29): X is F  or P
  MISC_FEATURE (30)..(30): X is A or G
  MISC_FEATURE (31)..(31): X is T or S
  MISC_FEATURE (32)..(32): X is F or P
  MISC_FEATURE (33)..(33): X is T or S
  MISC_FEATURE (34)..(34): X is C or S
  MISC_FEATURE (35)..(35): X is I, L or V
  MISC_FEATURE (36)..(36): X is T or S
  MISC_FEATURE (37)..(37): X is T or S

SEQ ID NO: 343 - protein, 26 aa, Artificial
  Completely synthesized peptide construct
DLLKNGERIEKVEGGGERPTLAFLQD

SEQ ID NO: 344 - protein, 26 aa, Artificial
  peptide construct
  MISC_FEATURE (1)..(1): X is D and E for acidic amino acids
  MISC_FEATURE (2)..(2): X is I, L or V
  MISC_FEATURE (3)..(3): X is I, L or V
  MISC_FEATURE (4)..(4): X is K, R or H for basic amino acids
  MISC_FEATURE (5)..(5): X is N or Q for amidated amino acids
  MISC_FEATURE (6)..(6): X is A or G
  MISC_FEATURE (7)..(7): X is D and E for acidic amino acids
  MISC_FEATURE (8)..(8): X is K, R or H for basic amino acids
  MISC_FEATURE (9)..(9): X is I, L or V
  MISC_FEATURE (10)..(10): X is D and E for acidic amino acids
  MISC_FEATURE (11)..(11): X is K, R or H for basic amino acids
  MISC_FEATURE (12)..(12): X is I, L or V
  MISC_FEATURE (13)..(13): X is D and E for acidic amino acids
  MISC_FEATURE (14)..(14): X is A or G
  MISC_FEATURE (15)..(15): X is A or G
  MISC_FEATURE (16)..(16): X is A or G
  MISC_FEATURE (17)..(17): X is D and E for acidic amino acids
  MISC_FEATURE (18)..(18): X is K, R or H for basic amino acids
  MISC_FEATURE (19)..(19): X is F or P
  MISC_FEATURE (20)..(20): X is T or S
  MISC_FEATURE (21)..(21): X is I, L or V
  MISC_FEATURE (22)..(22): X is A or G
  MISC_FEATURE (23)..(23): X is F, W or Y for aromatic amino acids
  MISC_FEATURE (24)..(24): X is I, L or V
  MISC_FEATURE (25)..(25): X is N or Q for amidated amino acids
  MISC_FEATURE (26)..(26): X is D and E for acidic amino acids
XXXXXXXXXXXXXXXXXXXXXXXXXX

SEQ ID NO: 345 - protein, 26 aa, Artificial
  Completely synthesized peptide construct
DLLKNGERIEKVEGGGDRSTKVIDFH

SEQ ID NO: 346 - protein, 26 aa, Artificial
  peptide construct
  MISC_FEATURE (1)..(1): X is D and E for acidic amino acids
  MISC_FEATURE (2)..(2): X is I, L or V
  MISC_FEATURE (3)..(3): X is I, L or V
  MISC_FEATURE (4)..(4): X is K, R or H for basic amino acids
  MISC_FEATURE (5)..(5): X is N or Q for amidated amino acids
  MISC_FEATURE (6)..(6): X is A or G
  MISC_FEATURE (7)..(7): X is D and E for acidic amino acids
  MISC_FEATURE (8)..(8): X is K, R or H for basic amino acids
  MISC_FEATURE (9)..(9): X is I, L or V
  MISC_FEATURE (10)..(10): X is D and E for acidic amino acids
  MISC_FEATURE (11)..(11): X is K, R or H for basic amino acids
  MISC_FEATURE (12)..(12): X is I, L or V
  MISC_FEATURE (13)..(13): X is D and E for acidic amino acids
  MISC_FEATURE (14)..(14): X is A or G
  MISC_FEATURE (15)..(15): X is A or G
  MISC_FEATURE (16)..(16): X is A or G
  MISC_FEATURE (17)..(17): X is D and E for acidic amino acids
  MISC_FEATURE (18)..(18): X is K, R or H for basic amino acids
  MISC_FEATURE (19)..(19): X is C or S
  MISC_FEATURE (20)..(20): X is T or S
  MISC_FEATURE (21)..(21): X is K, R or H for basic amino acids
  MISC_FEATURE (22)..(22): X is I, L or V
  MISC_FEATURE (23)..(23): X is I, L or V
  MISC_FEATURE (24)..(24): X is D and E for acidic amino acids
  MISC_FEATURE (25)..(25): X is F, W or Y for aromatic amino acids
  MISC_FEATURE (26)..(26): X is K, R or H for basic amino acids
XXXXXXXXXXXXXXXXXXXXXXXXXX

SEQ ID NO: 347 - protein, 29 aa, Artificial
  Completely synthesized peptide construct
DLLKNGERIEKVEGGGIAGFKGEQGPKGE

SEQ ID NO: 348 - protein, 29 aa, Artificial
  peptide construct
  MISC_FEATURE (1)..(1): X is D and E for acidic amino acids
  MISC_FEATURE (2)..(2): X is I, L or V
  MISC_FEATURE (3)..(3): X is I, L or V
  MISC_FEATURE (4)..(4): X is K, R or H for basic amino acids
  MISC_FEATURE (5)..(5): X is N or Q for amidated amino acids
  MISC_FEATURE (6)..(6): X is A or G
  MISC_FEATURE (7)..(7): X is D and E for acidic amino acids
  MISC_FEATURE (8)..(8): X is K, R or H for basic amino acids
  MISC_FEATURE (9)..(9): X is I, L or V
  MISC_FEATURE (10)..(10): X is D and E for acidic amino acids
  MISC_FEATURE (11)..(11): X is K, R or H for basic amino acids
  MISC_FEATURE (12)..(12): X is I, L or V
  MISC_FEATURE (13)..(13): X is D and E for acidic amino acids
  MISC_FEATURE (14)..(14): X is A or G
  MISC_FEATURE (15)..(15): X is A or G
  MISC_FEATURE (16)..(16): X is A or G
  MISC_FEATURE (17)..(17): X is I, L or V
  MISC_FEATURE (18)..(18): X is A or G
  MISC_FEATURE (19)..(19): X is A or G
  MISC_FEATURE (20)..(20): X is F, W or Y for aromatic amino acids
  MISC_FEATURE (21)..(21): X is K, R or H for basic amino acids
  MISC_FEATURE (22)..(22): X is A or G
  MISC_FEATURE (23)..(23): X is D and E for acidic amino acids
  MISC_FEATURE (24)..(24): X is N or Q for amidated amino acids
  MISC_FEATURE (25)..(25): X is A or G
  MISC_FEATURE (26)..(26): X is F or P
  MISC_FEATURE (27)..(27): X is K, R or H for basic amino acids
  MISC_FEATURE (28)..(28): X is A or G
  MISC_FEATURE (29)..(29): X is D and E for acidic amino acids
XXXXXXXXXXXXXXXXXXXXXXXXXXXXX

SEQ ID NO: 349 - protein, 16 aa, Artificial
  Completely synthesized peptide construct
DLLKNGERIEKVEGGG

SEQ ID NO: 350 - protein, 16 aa, Artificial
  peptide construct
  MISC_FEATURE (1)..(1): X is D and E for acidic amino acids
  MISC_FEATURE (2)..(2): X is I, L or V
  MISC_FEATURE (3)..(3): X is I, L or V
  MISC_FEATURE (4)..(4): X is K, R or H for basic amino acids
  MISC_FEATURE (5)..(5): X is N or Q for amidated amino acids
  MISC_FEATURE (6)..(6): X is A or G
  MISC_FEATURE (7)..(7): X is D and E for acidic amino acids
  MISC_FEATURE (8)..(8): X is K, R or H for basic amino acids
  MISC_FEATURE (9)..(9): X is I, L or V
  MISC_FEATURE (10)..(10): X is D and E for acidic amino acids
  MISC_FEATURE (11)..(11): X is K, R or H for basic amino acids
  MISC_FEATURE (12)..(12): X is I, L or V
  MISC_FEATURE (13)..(13): X is D and E for acidic amino acids
  MISC_FEATURE (14)..(14): X is A or G
  MISC_FEATURE (15)..(15): X is A or G
  MISC_FEATURE (16)..(16): X is A or G
XXXXXXXXXXXXXXXX

SEQ ID NO: 351 - protein, 24 aa, Artificial
  Completely synthesized peptide construct
DLLKNGERIEKVEGGGKNIVTPRT

SEQ ID NO: 352 - protein, 24 aa, Artificial
  peptide construct
  MISC_FEATURE (1)..(1): X is D and E for acidic amino acids
  MISC_FEATURE (2)..(2): X is I, L or V
  MISC_FEATURE (3)..(3): X is I, L or V
  MISC_FEATURE (4)..(4): X is K, R or H for basic amino acids
  MISC_FEATURE (5)..(5): X is N or Q for amidated amino acids
  MISC_FEATURE (6)..(6): X is A or G
  MISC_FEATURE (7)..(7): X is D and E for acidic amino acids
  MISC_FEATURE (8)..(8): X is K, R or H for basic amino acids
  MISC_FEATURE (9)..(9): X is I, L or V
  MISC_FEATURE (10)..(10): X is D and E for acidic amino acids
  MISC_FEATURE (11)..(11): X is K, R or H for basic amino acids
  MISC_FEATURE (12)..(12): X is I, L or V
  MISC_FEATURE (13)..(13): X is D and E for acidic amino acids
  MISC_FEATURE (14)..(14): X is A or G
  MISC_FEATURE (15)..(15): X is A or G
  MISC_FEATURE (16)..(16): X is A or G
  MISC_FEATURE (17)..(17): X is K, R or H for basic amino acids
  MISC_FEATURE (18)..(18): X is N or Q for amidated amino acids
  MISC_FEATURE (19)..(19): X is I, L or V
  MISC_FEATURE (20)..(20): X is I, L or V
  MISC_FEATURE (21)..(21): X is T or S
  MISC_FEATURE (22)..(22): X is F or P
  MISC_FEATURE (23)..(23): X is K, R or H for basic amino acids
  MISC_FEATURE (24)..(24): X is T or S
XXXXXXXXXXXXXXXXXXXXXXXX

SEQ ID NO: 353 - protein, 31 aa, Artificial
  Completely synthesized peptide construct
DLLKNGERIEKVEGGGGDKVSFFCKNKEKKC

SEQ ID NO: 354 - protein, 31 aa, Artificial; identical to SEQ ID NO: 123
  peptide construct
  MISC_FEATURE (1)..(1): X is D and E for acidic amino acids
  MISC_FEATURE (2)..(2): X is I, L or V
  MISC_FEATURE (3)..(3): X is I, L or V
  MISC_FEATURE (4)..(4): X is K, R or H for basic amino acids
  MISC_FEATURE (5)..(5): X is N or Q for amidated amino acids
  MISC_FEATURE (6)..(6): X is A or G
  MISC_FEATURE (7)..(7): X is D and E for acidic amino acids
  MISC_FEATURE (8)..(8): X is K, R or H for basic amino acids
  MISC_FEATURE (9)..(9): X is I, L or V
  MISC_FEATURE (10)..(10): X is D and E for acidic amino acids
  MISC_FEATURE (11)..(11): X is K, R or H for basic amino acids
  MISC_FEATURE (12)..(12): X is I, L or V
  MISC_FEATURE (13)..(13): X is D and E for acidic amino acids
  MISC_FEATURE (14)..(14): X is A or G
  MISC_FEATURE (15)..(15): X is A or G
  MISC_FEATURE (16)..(16): X is A or G
  MISC_FEATURE (17)..(17): X is A or G
  MISC_FEATURE (18)..(18): X is D and E for acidic amino acids
  MISC_FEATURE (19)..(19): X is K, R or H for basic amino acids
  MISC_FEATURE (20)..(20): X is I, L or V
  MISC_FEATURE (21)..(21): X is C or S
  MISC_FEATURE (22)..(22): X is F, W or Y for aromatic amino acids
  MISC_FEATURE (23)..(23): X is F, W or Y for aromatic amino acids
  MISC_FEATURE (24)..(24): X is C or S
  MISC_FEATURE (25)..(25): X is K, R or H for basic amino acids
  MISC_FEATURE (26)..(26): X is N or Q for aromatic amino acids
  MISC_FEATURE (27)..(27): X is K, R or H for basic amino acids
  MISC_FEATURE (28)..(28): X is D and E for acidic amino acids
  MISC_FEATURE (29)..(29): X is K, R or H for basic amino acids
  MISC_FEATURE (30)..(30): X is K, R or H for basic amino acids
  MISC_FEATURE (31)..(31): X is C or S

SEQ ID NO: 355 - protein, 33 aa, Artificial
  Completely synthesized peptide construct
DLLKNGERIEKVEGGGEIIVTHFPFDEQNCSMK

SEQ ID NO: 356 - protein, 33 aa, Artificial; identical to SEQ ID NO: 97
  peptide construct
  MISC_FEATURE (1)..(1): X is D and E for acidic amino acids
  MISC_FEATURE (2)..(2): X is I, L or V
  MISC_FEATURE (3)..(3): X is I, L or V
  MISC_FEATURE (4)..(4): X is K, R or H for basic amino acids
  MISC_FEATURE (5)..(5): X is N or Q for amidated amino acids
  MISC_FEATURE (6)..(6): X is A or G
  MISC_FEATURE (7)..(7): X is D and E for acidic amino acids
  MISC_FEATURE (8)..(8): X is K, R or H for basic amino acids
  MISC_FEATURE (9)..(9): X is I, L or V
  MISC_FEATURE (10)..(10): X is D and E for acidic amino acids
  MISC_FEATURE (11)..(11): X is K, R or H for basic amino acids
  MISC_FEATURE (12)..(12): X is I, L or V
  MISC_FEATURE (13)..(13): X is D and E for acidic amino acids
  MISC_FEATURE (14)..(14): X is A or G
  MISC_FEATURE (15)..(15): X is A or G
  MISC_FEATURE (16)..(16): X is A or G
  MISC_FEATURE (17)..(17): X is D and E for acidic amino acids
  MISC_FEATURE (18)..(18): X is I, L or V
  MISC_FEATURE (19)..(19): X is I, L or V
  MISC_FEATURE (20)..(20): X is I, L or V
  MISC_FEATURE (21)..(21): X is T or S
  MISC_FEATURE (22)..(22): X is K, R or H for basic amino acids
  MISC_FEATURE (23)..(23): X is F, W or Y for aromatic amino acids
  MISC_FEATURE (24)..(24): X is F or P
  MISC_FEATURE (25)..(25): X is F, W or Y for aromatic amino acids
  MISC_FEATURE (26)..(26): X is D and E for acidic amino acids
  MISC_FEATURE (27)..(27): X is D and E for acidic amino acids
  MISC_FEATURE (28)..(28): X is N or Q for aromatic amino acids
  MISC_FEATURE (29)..(29): X is N or Q for aromatic amino acids
  MISC_FEATURE (30)..(30): X is C or S
  MISC_FEATURE (31)..(31): X is C or S
  MISC_FEATURE (32)..(32): X is M or Nle
  MISC_FEATURE (33)..(33): X is K, R or H for basic amino acids

SEQ ID NO: 357 - protein, 29 aa, Artificial
  Completely synthesized peptide construct
DLLKNGERIEKVEGGGVHFFKNIVTPRTP

SEQ ID NO: 358 - protein, 29 aa, Artificial
  peptide construct
  MISC_FEATURE (1)..(1): X is D and E for acidic amino acids
  MISC_FEATURE (2)..(2): X is I, L or V
  MISC_FEATURE (3)..(3): X is I, L or V
  MISC_FEATURE (4)..(4): X is K, R or H for basic amino acids
  MISC_FEATURE (5)..(5): X is N or Q for amidated amino acids
  MISC_FEATURE (6)..(6): X is A or G
  MISC_FEATURE (7)..(7): X is D and E for acidic amino acids
  MISC_FEATURE (8)..(8): X is K, R or H for basic amino acids
  MISC_FEATURE (9)..(9): X is I, L or V
  MISC_FEATURE (10)..(10): X is D and E for acidic amino acids
  MISC_FEATURE (11)..(11): X is K, R or H for basic amino acids
  MISC_FEATURE (12)..(12): X is I, L or V
  MISC_FEATURE (13)..(13): X is D and E for acidic amino acids
  MISC_FEATURE (14)..(14): X is A or G
  MISC_FEATURE (15)..(15): X is A or G
  MISC_FEATURE (16)..(16): X is A or G
  MISC_FEATURE (17)..(17): X is I, L or V
  MISC_FEATURE (18)..(18): X is K, R or H for basic amino acids
  MISC_FEATURE (19)..(19): X is F, W or Y for aromatic amino acids
  MISC_FEATURE (20)..(20): X is F, W or Y for aromatic amino acids
  MISC_FEATURE (21)..(21): X is K, R or H for basic amino acids
  MISC_FEATURE (22)..(22): X is N or Q for amidated amino acids
  MISC_FEATURE (23)..(23): X is I, L or V
  MISC_FEATURE (24)..(24): X is I,  L or V
  MISC_FEATURE (25)..(25): X is T or S
  MISC_FEATURE (26)..(26): X is F or P
  MISC_FEATURE (27)..(27): X is K, R or H for basic amino acids
  MISC_FEATURE (28)..(28): X is T or S
  MISC_FEATURE (29)..(29): X is F or P
XXXXXXXXXXXXXXXXXXXXXXXXXXXXX

SEQ ID NO: 359 - protein, 33 aa, Artificial
  Completely synthesized peptide construct
DLLKNGERIEKVEGGGYQQLNSERGVPNENIEN

SEQ ID NO: 360 - protein, 33 aa, Artificial; identical to SEQ ID NO: 97
  peptide construct
  MISC_FEATURE (1)..(1): X is D and E for acidic amino acids
  MISC_FEATURE (2)..(2): X is I, L or V
  MISC_FEATURE (3)..(3): X is I, L or V
  MISC_FEATURE (4)..(4): X is K, R or H for basic amino acids
  MISC_FEATURE (5)..(5): X is N or Q for amidated amino acids
  MISC_FEATURE (6)..(6): X is A or G
  MISC_FEATURE (7)..(7): X is D and E for acidic amino acids
  MISC_FEATURE (8)..(8): X is K, R or H for basic amino acids
  MISC_FEATURE (9)..(9): X is I, L or V
  MISC_FEATURE (10)..(10): X is D and E for acidic amino acids
  MISC_FEATURE (11)..(11): X is K, R or H for basic amino acids
  MISC_FEATURE (12)..(12): X is I, L or V
  MISC_FEATURE (13)..(13): X is D and E for acidic amino acids
  MISC_FEATURE (14)..(14): X is A or G
  MISC_FEATURE (15)..(15): X is A or G
  MISC_FEATURE (16)..(16): X is A or G
  MISC_FEATURE (17)..(17): X is F, W or Y for aromatic amino acids
  MISC_FEATURE (18)..(18): X is N or Q for aromatic amino acids
  MISC_FEATURE (19)..(19): X is N or Q for amidated amino acids
  MISC_FEATURE (20)..(20): X is I, L or V
  MISC_FEATURE (21)..(21): X is N or Q for amidated amino acids
  MISC_FEATURE (22)..(22): X is C or S
  MISC_FEATURE (23)..(23): X is D and E for acidic amino acids
  MISC_FEATURE (24)..(24): X is K, R or H for basic amino acids
  MISC_FEATURE (25)..(25): X is A or G
  MISC_FEATURE (26)..(26): X is I, L or V
  MISC_FEATURE (27)..(27): X is F or P
  MISC_FEATURE (28)..(28): X is N or Q for amidated amino acids
  MISC_FEATURE (29)..(29): X is D and E for acidic amino acids
  MISC_FEATURE (30)..(30): X is N or Q for amidated amino acids
  MISC_FEATURE (31)..(31): X is I, L or V
  MISC_FEATURE (32)..(32): X is D and E for acidic amino acids
  MISC_FEATURE (33)..(33): X is N or Q for amidated amino acids

SEQ ID NO: 361 - protein, 29 aa, Artificial
  Completely synthesized peptide construct
DLLKNGERIEKVEGGGVFIKRVSNVIIHG

SEQ ID NO: 362 - protein, 29 aa, Artificial
  peptide construct
  MISC_FEATURE (1)..(1): X is D and E for acidic amino acids
  MISC_FEATURE (2)..(2): X is I, L or V
  MISC_FEATURE (3)..(3): X is I, L or V
  MISC_FEATURE (4)..(4): X is K, R or H for basic amino acids
  MISC_FEATURE (5)..(5): X is N or Q for amidated amino acids
  MISC_FEATURE (6)..(6): X is A or G
  MISC_FEATURE (7)..(7): X is D and E for acidic amino acids
  MISC_FEATURE (8)..(8): X is K, R or H for basic amino acids
  MISC_FEATURE (9)..(9): X is I, L or V
  MISC_FEATURE (10)..(10): X is D and E for acidic amino acids
  MISC_FEATURE (11)..(11): X is K, R or H for basic amino acids
  MISC_FEATURE (12)..(12): X is I, L or V
  MISC_FEATURE (13)..(13): X is D and E for acidic amino acids
  MISC_FEATURE (14)..(14): X is A or G
  MISC_FEATURE (15)..(15): X is A or G
  MISC_FEATURE (16)..(16): X is A or G
  MISC_FEATURE (17)..(17): X is I, L or V
  MISC_FEATURE (18)..(18): X is F, W or Y for aromatic amino acids
  MISC_FEATURE (19)..(19): X is I, L or V
  MISC_FEATURE (20)..(20): X is K, R or H for basic amino acids
  MISC_FEATURE (21)..(21): X is K, R or H for basic amino acids
  MISC_FEATURE (22)..(22): X is I, L or V
  MISC_FEATURE (23)..(23): X is C or S
  MISC_FEATURE (24)..(24): X is N or Q for amidated amino acids
  MISC_FEATURE (25)..(25): X is I, L or V
  MISC_FEATURE (26)..(26): X is I, L or V
  MISC_FEATURE (27)..(27): X is I, L or V
  MISC_FEATURE (28)..(28): X is K, R or H for basic amino acids
  MISC_FEATURE (29)..(29): X is A or G
XXXXXXXXXXXXXXXXXXXXXXXXXXXXX

SEQ ID NO: 363 - protein, 31 aa, Artificial
  Completely synthesized peptide construct
DLLKNGERIEKVEGGGMKVTVAFNQFGPNRR

SEQ ID NO: 364 - protein, 31 aa, Artificial; identical to SEQ ID NO: 123
  peptide construct
  MISC_FEATURE (1)..(1): X is D and E for acidic amino acids
  MISC_FEATURE (2)..(2): X is I, L or V
  MISC_FEATURE (3)..(3): X is I, L or V
  MISC_FEATURE (4)..(4): X is K, R or H for basic amino acids
  MISC_FEATURE (5)..(5): X is N or Q for amidated amino acids
  MISC_FEATURE (6)..(6): X is A or G
  MISC_FEATURE (7)..(7): X is D and E for acidic amino acids
  MISC_FEATURE (8)..(8): X is K, R or H for basic amino acids
  MISC_FEATURE (9)..(9): X is I, L or V
  MISC_FEATURE (10)..(10): X is D and E for acidic amino acids
  MISC_FEATURE (11)..(11): X is K, R or H for basic amino acids
  MISC_FEATURE (12)..(12): X is I, L or V
  MISC_FEATURE (13)..(13): X is D and E for acidic amino acids
  MISC_FEATURE (14)..(14): X is A or G
  MISC_FEATURE (15)..(15): X is A or G
  MISC_FEATURE (16)..(16): X is A or G
  MISC_FEATURE (17)..(17): X is M or Nle
  MISC_FEATURE (18)..(18): X is K, R or H for basic amino acids
  MISC_FEATURE (19)..(19): X is I,  L or V
  MISC_FEATURE (20)..(20): X is T or S
  MISC_FEATURE (21)..(21): X is I, L or V
  MISC_FEATURE (22)..(22): X is A or G
  MISC_FEATURE (23)..(23): X is F, W or Y for aromatic amino acids
  MISC_FEATURE (24)..(24): X is N or Q for amidated amino acids
  MISC_FEATURE (25)..(25): X is N or Q for amidated amino acids
  MISC_FEATURE (26)..(26): X is F, W or Y for aromatic amino acids
  MISC_FEATURE (27)..(27): X is A or G
  MISC_FEATURE (28)..(28): X is F or P
  MISC_FEATURE (29)..(29): X is N or Q for amidated amino acids
  MISC_FEATURE (30)..(30): X is K, R or H for basic amino acids
  MISC_FEATURE (31)..(31): X is K, R or H for basic amino acids

SEQ ID NO: 365 - protein, 31 aa, Artificial
  Completely synthesized peptide construct
DLLKNGERIEKVEGGGIASRRVDGIIAAYQN

SEQ ID NO: 366 - protein, 31 aa, Artificial; identical to SEQ ID NO: 123
  peptide construct
  MISC_FEATURE (1)..(1): X is D and E for acidic amino acids
  MISC_FEATURE (2)..(2): X is I, L or V
  MISC_FEATURE (3)..(3): X is I, L or V
  MISC_FEATURE (4)..(4): X is K, R or H for basic amino
  MISC_FEATURE (5)..(5): X is N or Q for amidated amino acids
  MISC_FEATURE (6)..(6): X is A or G
  MISC_FEATURE (7)..(7): X is D and E for acidic amino acids
  MISC_FEATURE (8)..(8): X is K, R or H for basic amino acids
  MISC_FEATURE (9)..(9): X is I, L or V
  MISC_FEATURE (10)..(10): X is D and E for acidic amino acids
  MISC_FEATURE (11)..(11): X is K, R or H for basic amino acids
  MISC_FEATURE (12)..(12): X is I, L or V
  MISC_FEATURE (13)..(13): X is D and E for acidic amino acids
  MISC_FEATURE (14)..(14): X is A or G
  MISC_FEATURE (15)..(15): X is A or G
  MISC_FEATURE (16)..(16): X is A or G
  MISC_FEATURE (17)..(17): X is I, L or V
  MISC_FEATURE (18)..(18): X is A or G
  MISC_FEATURE (19)..(19): X is C or S
  MISC_FEATURE (20)..(20): X is K, R or H for basic amino acids
  MISC_FEATURE (21)..(21): X is K, R or H for basic amino acids
  MISC_FEATURE (22)..(22): X is I, L or V
  MISC_FEATURE (23)..(23): X is D and E for acidic amino acids
  MISC_FEATURE (24)..(24): X is A or G
  MISC_FEATURE (25)..(25): X is I, L or V
  MISC_FEATURE (26)..(26): X is I, L or V
  MISC_FEATURE (27)..(27): X is A or G
  MISC_FEATURE (28)..(28): X is A or G
  MISC_FEATURE (29)..(29): X is F, W or Y for aromatic amino acids
  MISC_FEATURE (30)..(30): X is N or Q for aromatic amino acids
  MISC_FEATURE (31)..(31): X is N or Q for aromatic amino acids

SEQ ID NO: 367 - protein, 35 aa, Artificial
  Completely synthesized peptide construct
DLLKNGERIEKVEGGGIDIFASKNFHLQKNTIGTG

SEQ ID NO: 368 - protein, 35 aa, Artificial; identical to SEQ ID NO: 197
  peptide construct
  MISC_FEATURE (1)..(1): X is D and E for acidic amino acids
  MISC_FEATURE (2)..(2): X is I, L or V
  MISC_FEATURE (3)..(3): X is I, L or V
  MISC_FEATURE (4)..(4): X is K, R or H for basic amino acids
  MISC_FEATURE (5)..(5): X is N or Q for amidated amino acids
  MISC_FEATURE (6)..(6): X is A or G
  MISC_FEATURE (7)..(7): X is D and E for acidic amino acids
  MISC_FEATURE (8)..(8): X is K, R or H for basic amino acids
  MISC_FEATURE (9)..(9): X is I, L or V
  MISC_FEATURE (10)..(10): X is D and E for acidic amino acids
  MISC_FEATURE (11)..(11): X is K, R or H for basic amino acids
  MISC_FEATURE (12)..(12): X is I, L or V
  MISC_FEATURE (13)..(13): X is D and E for acidic amino acids
  MISC_FEATURE (14)..(14): X is A or G
  MISC_FEATURE (15)..(15): X is A or G
  MISC_FEATURE (16)..(16): X is A or G
  MISC_FEATURE (17)..(17): X is I, L or V
  MISC_FEATURE (18)..(18): X is D and E for acidic amino acids
  MISC_FEATURE (19)..(19): X is I, L or V
  MISC_FEATURE (20)..(20): X is F, W or Y for aromatic amino acids
  MISC_FEATURE (21)..(21): X is A or G
  MISC_FEATURE (22)..(22): X is C or S
  MISC_FEATURE (23)..(23): X is K, R or H for basic amino acids
  MISC_FEATURE (24)..(24): X is N or Q for amidated amino acids
  MISC_FEATURE (25)..(25): X is F, W or Y for aromatic amino acids
  MISC_FEATURE (26)..(26): X is K, R or H for basic amino acids
  MISC_FEATURE (27)..(27): X is I, L or V
  MISC_FEATURE (28)..(28): X is N or Q for amidated amino acids
  MISC_FEATURE (29)..(29): X is K, R or H for basic amino acids
  MISC_FEATURE (30)..(30): X is N or Q for amidated amino acids
  MISC_FEATURE (31)..(31): X is T or S
  MISC_FEATURE (32)..(32): X is I, L or V
  MISC_FEATURE (33)..(33): X is A or G
  MISC_FEATURE (34)..(34): X is T or S
  MISC_FEATURE (35)..(35): X is A or G

SEQ ID NO: 369 - protein, 41 aa, Artificial
  Completely synthesized peptide construct
DLLKNGERIEKVEGGGGIGAVLKVLTTGPALISWIKRKRQQ

SEQ ID NO: 370 - protein, 41 aa, Artificial
  peptide construct
  MISC_FEATURE (1)..(1): X is D and E for acidic amino acids
  MISC_FEATURE (2)..(2): X is I, L or V
  MISC_FEATURE (3)..(3): X is I, L or V
  MISC_FEATURE (4)..(4): X is K, R or H for basic amino acids
  MISC_FEATURE (5)..(5): X is N or Q for amidated amino acids
  MISC_FEATURE (6)..(6): X is A or G
  MISC_FEATURE (7)..(7): X is D and E for acidic amino acids
  MISC_FEATURE (8)..(8): X is K, R or H for basic amino acids
  MISC_FEATURE (9)..(9): X is I, L or V
  MISC_FEATURE (10)..(10): X is D and E for acidic amino acids
  MISC_FEATURE (11)..(11): X is K, R or H for basic amino acids
  MISC_FEATURE (12)..(12): X is I, L or V
  MISC_FEATURE (13)..(13): X is D and E for acidic amino acids
  MISC_FEATURE (14)..(14): X is A or G
  MISC_FEATURE (15)..(15): X is A or G
  MISC_FEATURE (16)..(16): X is A or G
  MISC_FEATURE (17)..(17): X is A or G
  MISC_FEATURE (18)..(18): X is I, L or V
  MISC_FEATURE (19)..(19): X is A or G
  MISC_FEATURE (20)..(20): X is A or G
  MISC_FEATURE (21)..(21): X is I, L or V
  MISC_FEATURE (22)..(22): X is I, L or V
  MISC_FEATURE (23)..(23): X is K, R or H for basic amino acids
  MISC_FEATURE (24)..(24): X is I, L or V
  MISC_FEATURE (25)..(25): X is I, L or V
  MISC_FEATURE (26)..(26): X is T or S
  MISC_FEATURE (27)..(27): X is T or S
  MISC_FEATURE (28)..(28): X is A or G
  MISC_FEATURE (29)..(29): X is F or P
  MISC_FEATURE (30)..(30): X is A or G
  MISC_FEATURE (31)..(31): X is I, L or V
  MISC_FEATURE (32)..(32): X is I, L or V
  MISC_FEATURE (33)..(33): X is C or S
  MISC_FEATURE (34)..(34): X is F, W or Y for aromatic amino acids
  MISC_FEATURE (35)..(35): X is I, L or V
  MISC_FEATURE (36)..(36): X is K, R or H for basic amino acids
  MISC_FEATURE (37)..(37): X is K, R or H for basic amino acids
  MISC_FEATURE (38)..(38): X is K, R or H for basic amino acids
  MISC_FEATURE (39)..(39): X is K, R or H for basic amino acids
  MISC_FEATURE (40)..(40): X is N or Q for amidated amino acids
  MISC_FEATURE (41)..(41): X is N or Q for amidated amino acids
  MISC_FEATURE (41)..(41): X is N or Q for amidated amino acids
XXXXXXXXXXXXXXXXXXXXXXXXXXXXXXXXXXXXXXXXX

SEQ ID NO: 371 - protein, 56 aa, Artificial
  Completely synthesized peptide construct
DAEFRHDSGYEVHHQKLVFFAEDVGSNKGAIIGLMVGGVVGGGDLLKNGERIEKVE

SEQ ID NO: 372 - protein, 56 aa, Artificial; identical to SEQ ID NO: 292
  peptide construct
  MISC_FEATURE (1)..(1): X is D and E for acidic amino acids
  MISC_FEATURE (2)..(2): X is A or G
  MISC_FEATURE (3)..(3): X is D and  E for acidic amino acids
  MISC_FEATURE (4)..(4): X is F,  W or Y for aromatic amino acids
  MISC_FEATURE (5)..(5): X is K, R or H for basic amino acids
  MISC_FEATURE (6)..(6): X is K, R or H for basic amino acids
  MISC_FEATURE (7)..(7): X is D and E for acidic amino acids
  MISC_FEATURE (8)..(8): X is T or S
  MISC_FEATURE (9)..(9): X is A or G
  MISC_FEATURE (10)..(10): X is F, W or Y for aromatic amino acids
  MISC_FEATURE (11)..(11): X is D and E for acidic amino acids
  MISC_FEATURE (12)..(12): X is I, L or V
  MISC_FEATURE (13)..(13): X is K, R or H for basic amino acids
  MISC_FEATURE (14)..(14): X is K, R or H for basic amino acids
  MISC_FEATURE (15)..(15): X is N or Q for amidated amino acids
  MISC_FEATURE (16)..(16): X is K, R or H for basic amino acids
  MISC_FEATURE (17)..(17): X is I, L or V
  MISC_FEATURE (18)..(18): X is I, L or V
  MISC_FEATURE (19)..(19): X is F, W or Y for aromatic amino acids
  MISC_FEATURE (20)..(20): X is F, W or Y for aromatic amino acids
  MISC_FEATURE (21)..(21): X is A or G
  MISC_FEATURE (22)..(22): X is D and E for acidic amino acids
  MISC_FEATURE (23)..(23): X is D and E for acidic amino acids
  MISC_FEATURE (24)..(24): X is I, L or V
  MISC_FEATURE (25)..(25): X is A or G
  MISC_FEATURE (26)..(26): X is C or S
  MISC_FEATURE (27)..(27): X is N or Q for amidated amino acids
  MISC_FEATURE (28)..(28): X is K, R or H for basic amino acids
  MISC_FEATURE (29)..(29): X is A or G
  MISC_FEATURE (30)..(30): X is A or G
  MISC_FEATURE (31)..(31): X is I, L or V
  MISC_FEATURE (32)..(32): X is I, L or V
  MISC_FEATURE (33)..(33): X is A or G
  MISC_FEATURE (34)..(34): X is I, L or V
  MISC_FEATURE (35)..(35): X is M or Nle
  MISC_FEATURE (36)..(36): X is I, L or V
  MISC_FEATURE (37)..(37): X is A or G
  MISC_FEATURE (38)..(38): X is A or G
  MISC_FEATURE (39)..(39): X is I, L or V
  MISC_FEATURE (40)..(40): X is I, L or V
  MISC_FEATURE (41)..(41): X is A and G
  MISC_FEATURE (42)..(42): X is A and G
  MISC_FEATURE (43)..(43): X is A and G
  MISC_FEATURE (44)..(44): X is D and E for acidic amino acids
  MISC_FEATURE (45)..(45): X is I, L or V
  MISC_FEATURE (46)..(46): X is I, L or V
  MISC_FEATURE (47)..(47): X is K, R or H for basic amino acids
  MISC_FEATURE (48)..(48): X is N or Q for amidated amino acids
  MISC_FEATURE (49)..(49): X is A and G
  MISC_FEATURE (50)..(50): X is D and E for acidic amino acids
  MISC_FEATURE (51)..(51): X is K, R or H for basic amino acids
  MISC_FEATURE (52)..(52): X is I, L or V
  MISC_FEATURE (53)..(53): X is D and E for acidic amino acids
  MISC_FEATURE (54)..(54): X is K, R or H for basic amino acids
  MISC_FEATURE (55)..(55): X is I, L or V
  MISC_FEATURE (56)..(56): X is D and E for acidic amino acids

SEQ ID NO: 373 - protein, 43 aa, Artificial
  Completely synthesized peptide construct
DAEFRHDSGYEVHHQKLVFFAENVGSNKGGDLLKNGERIEKVE

SEQ ID NO: 374 - protein, 44 aa, Artificial; identical to SEQ ID NO: 294
  peptide construct
  MISC_FEATURE (1)..(1): X is D and E for acidic amino acids
  MISC_FEATURE (2)..(2): X is A or G
  MISC_FEATURE (3)..(3): X is D and E for acidic amino acids
  MISC_FEATURE (4)..(4): X is F, W or Y for aromatic amino acids
  MISC_FEATURE (5)..(5): X is K, R or H for basic amino acids
  MISC_FEATURE (6)..(6): X is K, R or H for basic amino acids
  MISC_FEATURE (7)..(7): X is D and E for acidic amino acids
  MISC_FEATURE (8)..(8): X is T or S
  MISC_FEATURE (9)..(9): X is A or G
  MISC_FEATURE (10)..(10): X is F, W or Y for aromatic amino acids
  MISC_FEATURE (11)..(11): X is A and G
  MISC_FEATURE (12)..(12): X is A and G
  MISC_FEATURE (13)..(13): X is A and G
  MISC_FEATURE (14)..(14): X is D and E for acidic amino acids
  MISC_FEATURE (15)..(15): X is I, L or V
  MISC_FEATURE (16)..(16): X is K, R or H for basic amino acids
  MISC_FEATURE (17)..(17): X is K, R or H for basic amino acids
  MISC_FEATURE (18)..(18): X is N or Q for amidated amino acids
  MISC_FEATURE (19)..(19): X is K, R or H for basic amino acids
  MISC_FEATURE (20)..(20): X is I, L or V
  MISC_FEATURE (21)..(21): X is I, L or V
  MISC_FEATURE (22)..(22): X is F, W or Y for aromatic amino acids
  MISC_FEATURE (23)..(23): X is F, W or Y for aromatic amino acids
  MISC_FEATURE (24)..(24): X is A and G
  MISC_FEATURE (25)..(25): X is D and E for acidic amino acids
  MISC_FEATURE (26)..(26): X is D and E for acidic amino acids
  MISC_FEATURE (27)..(27): X is I, L or V
  MISC_FEATURE (28)..(28): X is A and G
  MISC_FEATURE (29)..(29): X is C or S
  MISC_FEATURE (30)..(30): X is N or Q for amidated amino acids
  MISC_FEATURE (31)..(31): X is K, R or H for basic amino acids
  MISC_FEATURE (32)..(32): X is D and E for acidic amino acids
  MISC_FEATURE (33)..(33): X is I, L or V
  MISC_FEATURE (34)..(34): X is I, L or V
  MISC_FEATURE (35)..(35): X is K, R or H for basic amino acids
  MISC_FEATURE (36)..(36): X is N or Q for amidated amino acids
  MISC_FEATURE (37)..(37): X is A and G
  MISC_FEATURE (38)..(38): X is D and E for acidic amino acids
  MISC_FEATURE (39)..(39): X is K, R or H for basic amino acids
  MISC_FEATURE (40)..(40): X is I, L or V
  MISC_FEATURE (41)..(41): X is D and E for acidic amino acids
  MISC_FEATURE (42)..(42): X is K, R or H for basic amino acids
  MISC_FEATURE (43)..(43): X is I, L or V
  MISC_FEATURE (44)..(44): X is D and E for acidic amino acids

SEQ ID NO: 375 - protein, 46 aa, Artificial
  Completely synthesized peptide construct
DAEFRHDSGYEVHHQKLVFFAENVGSNKAIGGGDLLKNGERIEKVE

SEQ ID NO: 376 - protein, 46 aa, Artificial; identical to SEQ ID NO: 137
  peptide construct
  MISC_FEATURE (1)..(1): X is D and E for acidic amino acids
  MISC_FEATURE (2)..(2): X is A or G
  MISC_FEATURE (3)..(3): X is D and E for acidic amino acids
  MISC_FEATURE (4)..(4): X is F, W or Y for aromatic amino acids
  MISC_FEATURE (5)..(5): X is K, R or H for basic amino acids
  MISC_FEATURE (6)..(6): X is K, R or H for basic amino acids
  MISC_FEATURE (7)..(7): X is D and E for acidic amino acids
  MISC_FEATURE (8)..(8): X is T or S
  MISC_FEATURE (9)..(9): X is A or G
  MISC_FEATURE (10)..(10): X is F, W or Y for aromatic amino acids
  MISC_FEATURE (11)..(11): X is D and E for acidic amino acids
  MISC_FEATURE (12)..(12): X is I, L or V
  MISC_FEATURE (13)..(13): X is K, R or H for basic amino acids
  MISC_FEATURE (14)..(14): X is K, R or H for basic amino acids
  MISC_FEATURE (15)..(15): X is N or Q for amidated amino acids
  MISC_FEATURE (16)..(16): X is K,  R or H for basic amino acids
  MISC_FEATURE (17)..(17): X is I, L or V
  MISC_FEATURE (18)..(18): X is I, L or V
  MISC_FEATURE (19)..(19): X is F, W or Y for aromatic amino acids
  MISC_FEATURE (20)..(20): X is F, W or Y for aromatic amino acids
  MISC_FEATURE (21)..(21): X is A or G
  MISC_FEATURE (22)..(22): X is D and E for acidic amino acids
  MISC_FEATURE (23)..(23): X is D and E for acidic amino acids
  MISC_FEATURE (24)..(24): X is I, L or V
  MISC_FEATURE (25)..(25): X is A or G
  MISC_FEATURE (26)..(26): X is C or S
  MISC_FEATURE (27)..(27): X is N or Q for amidated amino acids
  MISC_FEATURE (28)..(28): X is K, R or H for basic amino acids
  MISC_FEATURE (29)..(29): X is A or G
  MISC_FEATURE (30)..(30): X is I, L or V
  MISC_FEATURE (31)..(31): X is A and G
  MISC_FEATURE (32)..(32): X is A and G
  MISC_FEATURE (33)..(33): X is A and G
  MISC_FEATURE (34)..(34): X is D and E for acidic amino acids
  MISC_FEATURE (35)..(35): X is I, L or V
  MISC_FEATURE (36)..(36): X is I, L or V
  MISC_FEATURE (37)..(37): X is K, R or H for basic amino acids
  MISC_FEATURE (38)..(38): X is N or Q for amidated amino acids
  MISC_FEATURE (39)..(39): X is A and G
  MISC_FEATURE (40)..(40): X is D and E for acidic amino acids
  MISC_FEATURE (41)..(41): X is K, R or H for basic amino acids
  MISC_FEATURE (42)..(42): X is I, L or V
  MISC_FEATURE (43)..(43): X is D and E for acidic amino acids
  MISC_FEATURE (44)..(44): X is K, R or H for basic amino acids
  MISC_FEATURE (45)..(45): X is I, L or V
  MISC_FEATURE (46)..(46): X is D and E for acidic amino acids

SEQ ID NO: 377 - protein, 27 aa, Artificial
  Completely synthesized peptide construct
DAEFRHDSGYEGGGDLLKNGERIEKVE

SEQ ID NO: 378 - protein, 27 aa, Artificial
  peptide construct
  MISC_FEATURE (1)..(1): X is D and E for acidic amino acids
  MISC_FEATURE (2)..(2): X is A or G
  MISC_FEATURE (3)..(3): X is D and E for acidic amino acids
  MISC_FEATURE (4)..(4): X is F, W or Y for aromatic amino acids
  MISC_FEATURE (5)..(5): X is K, R or H for basic amino acids
  MISC_FEATURE (6)..(6): X is K, R or H for basic amino acids
  MISC_FEATURE (7)..(7): X is D and E for acidic amino acids
  MISC_FEATURE (8)..(8): X is T or S
  MISC_FEATURE (9)..(9): X is A or G
  MISC_FEATURE (10)..(10): X is F, W or Y for aromatic amino acids
  MISC_FEATURE (11)..(11): X is D and E for acidic amino acids
  MISC_FEATURE (12)..(12): X is A and G
  MISC_FEATURE (13)..(13): X is A and G
  MISC_FEATURE (14)..(14): X is A and G
  MISC_FEATURE (15)..(15): X is D and E for acidic amino acids
  MISC_FEATURE (16)..(16): X is I, L or V
  MISC_FEATURE (17)..(17): X is I, L or V
  MISC_FEATURE (18)..(18): X is K, R or H for basic amino acids
  MISC_FEATURE (19)..(19): X is N or Q for amidated amino acids
  MISC_FEATURE (20)..(20): X is A and G
  MISC_FEATURE (21)..(21): X is D and E for acidic amino acids
  MISC_FEATURE (22)..(22): X is K, R or H for basic amino acids
  MISC_FEATURE (23)..(23): X is I, L or V
  MISC_FEATURE (24)..(24): X is D and E for acidic amino acids
  MISC_FEATURE (25)..(25): X is K, R or H for basic amino acids
  MISC_FEATURE (26)..(26): X is I, L or V
  MISC_FEATURE (27)..(27): X is D and E for acidic amino acids
XXXXXXXXXXXXXXXXXXXXXXXXXXX

SEQ ID NO: 379 - protein, 23 aa, Artificial
  Completely synthesized peptide construct
ENVGSNKGGGDLLKNGERIEKVE

SEQ ID NO: 380 - protein, 23 aa, Artificial
  peptide construct
  MISC_FEATURE (1)..(1): X is D and E for acidic amino acids
  MISC_FEATURE (2)..(2): X is D and E for acidic amino acids
  MISC_FEATURE (3)..(3): X is I, L or V
  MISC_FEATURE (4)..(4): X is A or G
  MISC_FEATURE (5)..(5): X is C or S
  MISC_FEATURE (6)..(6): X is N or Q for amidated amino acids
  MISC_FEATURE (7)..(7): X is K, R or H for basic amino acids
  MISC_FEATURE (8)..(8): X is A and G
  MISC_FEATURE (9)..(9): X is A and G
  MISC_FEATURE (10)..(10): X is A and G
  MISC_FEATURE (11)..(11): X is D and E for acidic amino acids
  MISC_FEATURE (12)..(12): X is I, L or V
  MISC_FEATURE (13)..(13): X is I, L or V
  MISC_FEATURE (14)..(14): X is K, R or H for basic amino acids
  MISC_FEATURE (15)..(15): X is N or Q for amidated amino acids
  MISC_FEATURE (16)..(16): X is A and G
  MISC_FEATURE (17)..(17): X is D and E for acidic amino acids
  MISC_FEATURE (18)..(18): X is K, R or H for basic amino acids
  MISC_FEATURE (19)..(19): X is I, L or V
  MISC_FEATURE (20)..(20): X is D and E for acidic amino acids
  MISC_FEATURE (21)..(21): X is K, R or H for basic amino acids
  MISC_FEATURE (22)..(22): X is I, L or V
  MISC_FEATURE (23)..(23): X is D and E for acidic amino acids
XXXXXXXXXXXXXXXXXXXXXXX

SEQ ID NO: 381 - protein, 28 aa, Artificial
  Completely synthesized peptide construct
DAEFRHDSGYEVGGGDLLKNGERIEKVE

SEQ ID NO: 382 - protein, 28 aa, Artificial
  peptide construct
  MISC_FEATURE (1)..(1): X is D and E for acidic amino acids
  MISC_FEATURE (2)..(2): X is A or G
  MISC_FEATURE (3)..(3): X is D and E for acidic amino acids
  MISC_FEATURE (4)..(4): X is F, W or Y for aromatic amino acids
  MISC_FEATURE (5)..(5): X is K, R or H for basic amino acids
  MISC_FEATURE (6)..(6): X is K, R or H for basic amino acids
  MISC_FEATURE (7)..(7): X is D and E for acidic amino acids
  MISC_FEATURE (8)..(8): X is T or S
  MISC_FEATURE (9)..(9): X is A or G
  MISC_FEATURE (10)..(10): X is F, W or Y for aromatic amino acids
  MISC_FEATURE (11)..(11): X is D and E for acidic amino acids
  MISC_FEATURE (12)..(12): X is I, L or V
  MISC_FEATURE (13)..(13): X is A and G
  MISC_FEATURE (14)..(14): X is A and G
  MISC_FEATURE (15)..(15): X is A and G
  MISC_FEATURE (16)..(16): X is D and E for acidic amino acids
  MISC_FEATURE (17)..(17): X is I, L or V
  MISC_FEATURE (18)..(18): X is I, L or V
  MISC_FEATURE (19)..(19): X is K, R or H for basic amino acids
  MISC_FEATURE (20)..(20): X is N or Q for amidated amino acids
  MISC_FEATURE (21)..(21): X is A and G
  MISC_FEATURE (22)..(22): X is D and E for acidic amino acids
  MISC_FEATURE (23)..(23): Xis K, R or H for basic amino acids
  MISC_FEATURE (24)..(24): X is I, L or V
  MISC_FEATURE (25)..(25): X is D and E for acidic amino acids
  MISC_FEATURE (26)..(26): X is K, R or H for basic amino acids
  MISC_FEATURE (27)..(27): X is I, L or V
  MISC_FEATURE (28)..(28): X is D and E for acidic amino acids
XXXXXXXXXXXXXXXXXXXXXXXXXXXX

SEQ ID NO: 383 - protein, 26 aa, Artificial
  Completely synthesized peptide construct
DAEFRHDSGYGGGDLLKNGERIEKVE

SEQ ID NO: 384 - protein, 26 aa, Artificial
  peptide construct
  MISC_FEATURE (1)..(1): X is D and E for acidic amino acids
  MISC_FEATURE (2)..(2): X is A or G
  MISC_FEATURE (3)..(3): X is D and E for acidic amino acids
  MISC_FEATURE (4)..(4): X is F, W or Y for aromatic amino acids
  MISC_FEATURE (5)..(5): X is K, R or H for basic amino acids
  MISC_FEATURE (6)..(6): X is K, R or H for basic amino acids
  MISC_FEATURE (7)..(7): X is D and E for acidic amino acids
  MISC_FEATURE (8)..(8): X is T or S
  MISC_FEATURE (9)..(9): X is A or G
  MISC_FEATURE (10)..(10): X is F,  W or Y for aromatic amino acids
  MISC_FEATURE (11)..(11): X is A and G
  MISC_FEATURE (12)..(12): X is A and G
  MISC_FEATURE (13)..(13): X is A and G
  MISC_FEATURE (14)..(14): X is D and E for acidic amino acids
  MISC_FEATURE (15)..(15): X is I, L or V
  MISC_FEATURE (16)..(16): X is I, L or V
  MISC_FEATURE (17)..(17): X is K, R or H for basic amino acids
  MISC_FEATURE (18)..(18): X is N or Q for amidated amino acids
  MISC_FEATURE (19)..(19): X is A and G
  MISC_FEATURE (20)..(20): X is D and E for acidic amino acids
  MISC_FEATURE (21)..(21): X is K, R or H for basic amino acids
  MISC_FEATURE (22)..(22): X is I, L or V
  MISC_FEATURE (23)..(23): X is D and E for acidic amino acids
  MISC_FEATURE (24)..(24): X is K, R or H for basic amino acids
  MISC_FEATURE (25)..(25): X is I, L or V
  MISC_FEATURE (26)..(26): X is D and E for acidic amino acids
XXXXXXXXXXXXXXXXXXXXXXXXXX

SEQ ID NO: 385 - protein, 20 aa, Artificial
  Completely synthesized peptide construct
EFRHGGGDLLKNGERIEKVE

SEQ ID NO: 386 - protein, 20 aa, Artificial
  peptide construct
  MISC_FEATURE (1)..(1): X is D and E for acidic amino acids
  MISC_FEATURE (2)..(2): X is F or P
  MISC_FEATURE (3)..(3): X is K, R or H for basic amino acids
  MISC_FEATURE (4)..(4): X is K, R or H for basic amino acids
  MISC_FEATURE (5)..(5): X is A and G
  MISC_FEATURE (6)..(6): X is A and G
  MISC_FEATURE (7)..(7): X is A and G
  MISC_FEATURE (8)..(8): X is D and E for acidic amino acids
  MISC_FEATURE (9)..(9): X is I, L or V
  MISC_FEATURE (10)..(10): X is I, L or V
  MISC_FEATURE (11)..(11): X is K, R or H for basic amino acids
  MISC_FEATURE (12)..(12): X is N or Q for amidated amino acids
  MISC_FEATURE (13)..(13): X is A and G
  MISC_FEATURE (14)..(14): X is D and E for acidic amino acids
  MISC_FEATURE (15)..(15): X is K, R or H for basic amino acids
  MISC_FEATURE (16)..(16): X is I, L or V
  MISC_FEATURE (17)..(17): X is D and E for acidic amino acids
  MISC_FEATURE (18)..(18): X is K, R or H for basic amino acids
  MISC_FEATURE (19)..(19): X is I, L or V
  MISC_FEATURE (20)..(20): X is D and E for acidic amino acids
XXXXXXXXXXXXXXXXXXXX

SEQ ID NO: 387 - protein, 35 aa, Artificial
  Completely synthesized peptide construct
DSAFDVLSFTAEEKAGVYKGGGDLLKNGERIEKVE

SEQ ID NO: 388 - protein, 35 aa, Artificial; identical to SEQ ID NO: 197
  peptide construct
  MISC_FEATURE (1)..(1): X is D and E for acidic amino acids
  MISC_FEATURE (2)..(2): X is C or S
  MISC_FEATURE (3)..(3): X is A or G
  MISC_FEATURE (4)..(4): X is F, W or Y for aromatic amino acids
  MISC_FEATURE (5)..(5): X is D and E for acidic amino acids
  MISC_FEATURE (6)..(6): X is I, L or V
  MISC_FEATURE (7)..(7): X is I, L or V
  MISC_FEATURE (8)..(8): X is C or S
  MISC_FEATURE (9)..(9): X is F, W or Y for aromatic amino acids
  MISC_FEATURE (10)..(10): X is T or S
  MISC_FEATURE (11)..(11): X is A or G
  MISC_FEATURE (12)..(12): X is D and E for acidic amino acids
  MISC_FEATURE (13)..(13): X is D and E for acidic amino acids
  MISC_FEATURE (14)..(14): X is K, R or H for basic amino acids
  MISC_FEATURE (15)..(15): X is A or G
  MISC_FEATURE (16)..(16): X is A or G
  MISC_FEATURE (17)..(17): X is I, L or V
  MISC_FEATURE (18)..(18): X is F, W or Y for aromatic amino acids
  MISC_FEATURE (19)..(19): X is K, R or H for basic amino acids
  MISC_FEATURE (20)..(20): X is A and G
  MISC_FEATURE (21)..(21): X is A and G
  MISC_FEATURE (22)..(22): X is A and G
  MISC_FEATURE (23)..(23): X is D and E for acidic amino acids
  MISC_FEATURE (24)..(24): X is I, L or V
  MISC_FEATURE (25)..(25): X is I, L or V
  MISC_FEATURE (26)..(26): X is K, R or H for basic amino acids
  MISC_FEATURE (27)..(27): X is N or Q for amidated amino acids
  MISC_FEATURE (28)..(28): X is A and G
  MISC_FEATURE (29)..(29): X is D and E for acidic amino acids
  MISC_FEATURE (30)..(30): X is K, R or H for basic amino acids
  MISC_FEATURE (31)..(31): X is I, L or V
  MISC_FEATURE (32)..(32): X is D and E for acidic amino acids
  MISC_FEATURE (33)..(33): X is K, R or H for basic amino acids
  MISC_FEATURE (34)..(34): X is I, L or V
  MISC_FEATURE (35)..(35): X is D and E for acidic amino acids

SEQ ID NO: 389 - protein, 30 aa, Artificial
  Completely synthesized peptide construct
SLKLMATLFSTYASGGGDLLKNGERIEKVE

SEQ ID NO: 390 - protein, 30 aa, Artificial; identical to SEQ ID NO: 56
  peptide construct
  MISC_FEATURE (1)..(1): X is C or S
  MISC_FEATURE (2)..(2): X is I, L or V
  MISC_FEATURE (3)..(3): X is K, R or H for basic amino acids
  MISC_FEATURE (4)..(4): X is I, L or V
  MISC_FEATURE (5)..(5): X is M or Nle
  MISC_FEATURE (6)..(6): X is A or G
  MISC_FEATURE (7)..(7): X is T or S
  MISC_FEATURE (8)..(8): X is I, L or V
  MISC_FEATURE (9)..(9): X is F or P
  MISC_FEATURE (10)..(10): X is C or S
  MISC_FEATURE (11)..(11): X is T or S
  MISC_FEATURE (12)..(12): X is F, W or Y for aromatic amino acids
  MISC_FEATURE (13)..(13): X is A or G
  MISC_FEATURE (14)..(14): X is C or S
  MISC_FEATURE (15)..(15): X is A and G
  MISC_FEATURE (16)..(16): X is A and G
  MISC_FEATURE (17)..(17): X is A and G
  MISC_FEATURE (18)..(18): X is D and E for acidic amino acids
  MISC_FEATURE (19)..(19): X is I, L or V
  MISC_FEATURE (20)..(20): X is I, L or V
  MISC_FEATURE (21)..(21): X is K, R or H for basic amino acids
  MISC_FEATURE (22)..(22): X is N or Q for amidated amino acids
  MISC_FEATURE (23)..(23): X is A and G
  MISC_FEATURE (24)..(24): X is D and E for acidic amino acids
  MISC_FEATURE (25)..(25): X is K, R or H for basic amino acids
  MISC_FEATURE (26)..(26): X is I, L or V
  MISC_FEATURE (27)..(27): X is D and E for acidic amino acids
  MISC_FEATURE (28)..(28): X is K, R or H for basic amino acids
  MISC_FEATURE (29)..(29): X is I, L or V
  MISC_FEATURE (30)..(30): X is D and E for acidic amino acids

SEQ ID NO: 391 - protein, 29 aa, Artificial
  Completely synthesized peptide construct
LKLMATLFSSYATGGGDLLKNGERIEKVE

SEQ ID NO: 392 - protein, 30 aa, Artificial; identical to SEQ ID NO: 56
  peptide construct
  MISC_FEATURE (1)..(1): X is C or S
  MISC_FEATURE (2)..(2): X is I, L or V
  MISC_FEATURE (3)..(3): X is K, R or  H for basic amino acids
  MISC_FEATURE (4)..(4): X is I, L or V
  MISC_FEATURE (5)..(5): X is M or Nle
  MISC_FEATURE (6)..(6): X is A or G
  MISC_FEATURE (7)..(7): X is T or S
  MISC_FEATURE (8)..(8): X is I, L or V
  MISC_FEATURE (9)..(9): X is F or P
  MISC_FEATURE (10)..(10): X is C or S
  MISC_FEATURE (11)..(11): X is C or S
  MISC_FEATURE (12)..(12): X is F, W or Y for aromatic amino acids
  MISC_FEATURE (13)..(13): X is A or G
  MISC_FEATURE (14)..(14): X is T or S
  MISC_FEATURE (15)..(15): X is A and G
  MISC_FEATURE (16)..(16): X is A and G
  MISC_FEATURE (17)..(17): X is A and G
  MISC_FEATURE (18)..(18): X is D and E for acidic amino acids
  MISC_FEATURE (19)..(19): X is I, L or V
  MISC_FEATURE (20)..(20): X is I, L or V
  MISC_FEATURE (21)..(21): X is K, R or H for basic amino acids
  MISC_FEATURE (22)..(22): X is N or Q for amidated amino acids
  MISC_FEATURE (23)..(23): X is A and G
  MISC_FEATURE (24)..(24): X is D and E for acidic amino acids
  MISC_FEATURE (25)..(25): X is K, R or H for basic amino acids
  MISC_FEATURE (26)..(26): X is I, L or V
  MISC_FEATURE (27)..(27): X is D and E for acidic amino acids
  MISC_FEATURE (28)..(28): X is K, R or H for basic amino acids
  MISC_FEATURE (29)..(29): X is I, L or V
  MISC_FEATURE (30)..(30): X is D and E for acidic amino acids

SEQ ID NO: 393 - protein, 27 aa, Artificial
  Completely synthesized peptide construct
NITEIADLTQKGGGDLLKNGERIEKVE

SEQ ID NO: 394 - protein, 27 aa, Artificial
  peptide construct
  MISC_FEATURE (1)..(1): X is N or Q for amidated amino acids
  MISC_FEATURE (2)..(2): X is I, L or V
  MISC_FEATURE (3)..(3): X is T or S
  MISC_FEATURE (4)..(4): X is D and E for acidic amino acids
  MISC_FEATURE (5)..(5): X is I, L or V
  MISC_FEATURE (6)..(6): X is A or G
  MISC_FEATURE (7)..(7): X is D and E for acidic amino acids
  MISC_FEATURE (8)..(8): X is I, L or V
  MISC_FEATURE (9)..(9): X is T or S
  MISC_FEATURE (10)..(10): X is N or Q for amidated amino acids
  MISC_FEATURE (11)..(11): X is K, R or H for basic amino acids
  MISC_FEATURE (12)..(12): X is A and G
  MISC_FEATURE (13)..(13): X is A and G
  MISC_FEATURE (14)..(14): X is A and G
  MISC_FEATURE (15)..(15): X is D and E for acidic amino acids
  MISC_FEATURE (16)..(16): X is I, L or V
  MISC_FEATURE (17)..(17): X is I, L or V
  MISC_FEATURE (18)..(18): X is K, R or H for basic amino acids
  MISC_FEATURE (19)..(19): X is N or Q for amidated amino acids
  MISC_FEATURE (20)..(20): X is A and G
  MISC_FEATURE (21)..(21): X is D and E for acidic amino acids
  MISC_FEATURE (22)..(22): X is K, R or H for basic amino acids
  MISC_FEATURE (23)..(23): X is I, L or V
  MISC_FEATURE (24)..(24): X is D and E for acidic amino acids
  MISC_FEATURE (25)..(25): X is K, R or H for basic amino acids
  MISC_FEATURE (26)..(26): X is I, L or V
  MISC_FEATURE (27)..(27): X is D and E for acidic amino acids
XXXXXXXXXXXXXXXXXXXXXXXXXXX

SEQ ID NO: 395 - protein, 56 aa, Artificial [sequence omitted]

SEQ ID NO: 396 - protein, 56 aa, Artificial; identical to SEQ ID NO: 292
  peptide construct
  MISC_FEATURE (1)..(1): X is N or Q for amidated amino acids
  MISC_FEATURE (2)..(2): X is M or Nle
  MISC_FEATURE (3)..(3): X is F, W or Y for aromatic amino acids
  MISC_FEATURE (4)..(4): X is A or G
  MISC_FEATURE (5)..(5): X is M or Nle
  MISC_FEATURE (6)..(6): X is M or Nle
  MISC_FEATURE (7)..(7): X is I, L or V
  MISC_FEATURE (8)..(8): X is A or G
  MISC_FEATURE (9)..(9): X is K, R or H for basic amino acids
  MISC_FEATURE (10)..(10): X is F, W or Y for aromatic amino acids
  MISC_FEATURE (11)..(11): X is K, R or H for basic amino acids
  MISC_FEATURE (12)..(12): X is M or Nle
  MISC_FEATURE (13)..(13): X is F, W or Y for aromatic amino acids
  MISC_FEATURE (14)..(14): X is F or P
  MISC_FEATURE (15)..(15): X is D and E for acidic amino acids
  MISC_FEATURE (16)..(16): X is I, L or V
  MISC_FEATURE (17)..(17): X is K, R or H for basic amino acids
  MISC_FEATURE (18)..(18): X is D and E for acidic amino acids
  MISC_FEATURE (19)..(19): X is K, R or H for basic amino acids
  MISC_FEATURE (20)..(20): X is A or G
  MISC_FEATURE (21)..(21): X is M or Nle
  MISC_FEATURE (22)..(22): X is A or G
  MISC_FEATURE (23)..(23): X is A or G
  MISC_FEATURE (24)..(24): X is I, L or V
  MISC_FEATURE (25)..(25): X is F or P
  MISC_FEATURE (26)..(26): X is K, R or H for basic amino acids
  MISC_FEATURE (27)..(27): X is I, L or V
  MISC_FEATURE (28)..(28): X is I, L or V
  MISC_FEATURE (29)..(29): X is A or G
  MISC_FEATURE (30)..(30): X is F, W or Y for aromatic amino acids
  MISC_FEATURE (31)..(31): X is T or S
  MISC_FEATURE (32)..(32): X is C or S
  MISC_FEATURE (33)..(33): X is D and E for acidic amino acids
  MISC_FEATURE (34)..(34): X is K, R or H for basic amino acids
  MISC_FEATURE (35)..(35): X is C or S
  MISC_FEATURE (36)..(36): X is K, R or H for basic amino acids
  MISC_FEATURE (37)..(37): X is F, W or Y for aromatic amino acids
  MISC_FEATURE (38)..(38): X is C or S
  MISC_FEATURE (39)..(39): X is I, L or V
  MISC_FEATURE (40)..(40): X is K, R or H for basic amino acids
  MISC_FEATURE (41)..(41): X is A and G
  MISC_FEATURE (42)..(42): X is A and G
  MISC_FEATURE (43)..(43): X is A and G
  MISC_FEATURE (44)..(44): X is D and E for acidic amino acids
  MISC_FEATURE (45)..(45): X is I, L or V
  MISC_FEATURE (46)..(46): X is I, L or V
  MISC_FEATURE (47)..(47): X is K, R or H for basic amino acids
  MISC_FEATURE (48)..(48): X is N or Q for amidated amino acids
  MISC_FEATURE (49)..(49): X is A and G
  MISC_FEATURE (50)..(50): X is D and E for acidic amino acids
  MISC_FEATURE (51)..(51): X is K, R or H for basic amino acids
  MISC_FEATURE (52)..(52): X is I, L or V
  MISC_FEATURE (53)..(53): X is D and  E for acidic amino acids
  MISC_FEATURE (54)..(54): X is K, R or H for basic amino acids
  MISC_FEATURE (55)..(55): X is I, L or V
  MISC_FEATURE (56)..(56): X is D and E for acidic amino acids

SEQ ID NO: 397 - protein, 50 aa, Artificial
  Completely synthesized peptide construct
IARFKMFPEVKEKGMAALPRLIAFTSEHSHFSLKGGGDLLKNGERIEKVE

SEQ ID NO: 398 - protein, 50 aa, Artificial; identical to SEQ ID NO: 318
  peptide construct
  MISC_FEATURE (1)..(1): X is I,  L or V
  MISC_FEATURE (2)..(2): X is A or G
  MISC_FEATURE (3)..(3): X is K, R or H for basic amino acids
  MISC_FEATURE (4)..(4): X is F, W or Y for aromatic amino acids
  MISC_FEATURE (5)..(5): X is K, R or H for basic amino acids
  MISC_FEATURE (6)..(6): X is M or Nle
  MISC_FEATURE (7)..(7): X is F, W or Y for aromatic amino acids
  MISC_FEATURE (8)..(8): X is F or P
  MISC_FEATURE (9)..(9): X is D and E for acidic amino acids
  MISC_FEATURE (10)..(10): X is I, L or V
  MISC_FEATURE (11)..(11): X is K, R or H for basic amino acids
  MISC_FEATURE (12)..(12): X is D and E for acidic amino acids
  MISC_FEATURE (13)..(13): X is K, R or H for basic amino acids
  MISC_FEATURE (14)..(14): X is A or G
  MISC_FEATURE (15)..(15): X is M or Nle
  MISC_FEATURE (16)..(16): X is A or G
  MISC_FEATURE (17)..(17): X is A or G
  MISC_FEATURE (18)..(18): X is I, L or V
  MISC_FEATURE (19)..(19): X is F or P
  MISC_FEATURE (20)..(20): X is K, R or H for basic amino acids
  MISC_FEATURE (21)..(21): X is I, L or V
  MISC_FEATURE (22)..(22): X is I, L or V
  MISC_FEATURE (23)..(23): X is A or G
  MISC_FEATURE (24)..(24): X is F, W or Y for aromatic amino acids
  MISC_FEATURE (25)..(25): X is T or S
  MISC_FEATURE (26)..(26): X is C or S
  MISC_FEATURE (27)..(27): X is D and E for acidic amino acids
  MISC_FEATURE (28)..(28): X is K, R or H for basic amino acids
  MISC_FEATURE (29)..(29): X is C or S
  MISC_FEATURE (30)..(30): X is K, R or H for basic amino acids
  MISC_FEATURE (31)..(31): X is F, W or Y for aromatic amino acids
  MISC_FEATURE (32)..(32): X is C or S
  MISC_FEATURE (33)..(33): X is I, L or V
  MISC_FEATURE (34)..(34): X is K, R or H for basic amino acids
  MISC_FEATURE (35)..(35): X is A and G
  MISC_FEATURE (36)..(36): X is A and G
  MISC_FEATURE (37)..(37): X is A and G
  MISC_FEATURE (38)..(38): X is D and E for acidic amino acids
  MISC_FEATURE (39)..(39): X is I, L or V
  MISC_FEATURE (40)..(40): X is I, L or V
  MISC_FEATURE (41)..(41): X is K, R or H for basic amino acids
  MISC_FEATURE (42)..(42): X is N or Q for amidated amino acids
  MISC_FEATURE (43)..(43): X is A and G
  MISC_FEATURE (44)..(44): X is D and E for acidic amino acids
  MISC_FEATURE (45)..(45): X is K, R or H for basic amino acids
  MISC_FEATURE (46)..(46): X is I, L or V
  MISC_FEATURE (47)..(47): X is D and E for acidic amino acids
  MISC_FEATURE (48)..(48): X is K, R or H for basic amino acids
  MISC_FEATURE (49)..(49): X is I, L or V
  MISC_FEATURE (50)..(50): X is D and E for acidic amino acids

SEQ ID NO: 399 - protein, 36 aa, Artificial
  Completely synthesized peptide construct
SRLSKVAPVIKARMMEYGTTGGGDLLKNGERIEKVE

SEQ ID NO: 400 - protein, 36 aa, Artificial; identical to SEQ ID NO: 164
  peptide construct
  MISC_FEATURE (1)..(1): X is C or S
  MISC_FEATURE (2)..(2): X is K, R or H for basic amino acids
  MISC_FEATURE (3)..(3): X is I, L or V
  MISC_FEATURE (4)..(4): X is C or S
  MISC_FEATURE (5)..(5): X is K, R or H for basic amino acids
  MISC_FEATURE (6)..(6): X is I, L or V
  MISC_FEATURE (7)..(7): X is A or G
  MISC_FEATURE (8)..(8): X is F or P
  MISC_FEATURE (9)..(9): X is I, L or V
  MISC_FEATURE (10)..(10): X is I, L or V
  MISC_FEATURE (11)..(11): X is K, R or H for basic amino acids
  MISC_FEATURE (12)..(12): X is A or G
  MISC_FEATURE (13)..(13): X is K, R or H for basic amino acids
  MISC_FEATURE (14)..(14): X is M or Nle
  MISC_FEATURE (15)..(15): X is M or Nle
  MISC_FEATURE (16)..(16): X is D and E for acidic amino acids
  MISC_FEATURE (17)..(17): X is F, W or Y for aromatic amino acids
  MISC_FEATURE (18)..(18): X is A or G
  MISC_FEATURE (19)..(19): X is T or S
  MISC_FEATURE (20)..(20): X is T or S
  MISC_FEATURE (21)..(21): X is A and G
  MISC_FEATURE (22)..(22): X is A and G
  MISC_FEATURE (23)..(23): X is A and G
  MISC_FEATURE (24)..(24): X is D and E for acidic amino acids
  MISC_FEATURE (25)..(25): X is I, L or V
  MISC_FEATURE (26)..(26): X is I, L or V
  MISC_FEATURE (27)..(27): X is K, R or H for basic amino acids
  MISC_FEATURE (28)..(28): X is N or Q for amidated amino acids
  MISC_FEATURE (29)..(29): X is A and G
  MISC_FEATURE (30)..(30): X is D and E for acidic amino acids
  MISC_FEATURE (31)..(31): X is K, R or H for basic amino acids
  MISC_FEATURE (32)..(32): X is I, L or V
  MISC_FEATURE (33)..(33): X is D and E for acidic amino acids
  MISC_FEATURE (34)..(34): X is K, R or H for basic amino acids
  MISC_FEATURE (35)..(35): X is I, L or V
  MISC_FEATURE (36)..(36): X is D and E for acidic amino acids

SEQ ID NO: 401 - protein, 35 aa, Artificial
  Completely synthesized peptide construct
IPPSLRYLEDEERMSRLSKGGGDLLKNGERIEKVE

SEQ ID NO: 402 - protein, 34 aa, Artificial; identical to SEQ ID NO: 77
  peptide construct
  MISC_FEATURE (1)..(1): X is I, L or V
  MISC_FEATURE (2)..(2): X is F or P
  MISC_FEATURE (3)..(3): X is F or P
  MISC_FEATURE (4)..(4): X is C or S
  MISC_FEATURE (5)..(5): X is I, L or V
  MISC_FEATURE (6)..(6): X is K, R or H for basic amino acids
  MISC_FEATURE (7)..(7): X is F, W or Y for aromatic amino acids
  MISC_FEATURE (8)..(8): X is D and E for acidic amino acids
  MISC_FEATURE (9)..(9): X is D and E for acidic amino acids
  MISC_FEATURE (10)..(10): X is D and E for acidic amino acids
  MISC_FEATURE (11)..(11): X is D and E for acidic amino acids
  MISC_FEATURE (12)..(12): X is K, R or H for basic amino acids
  MISC_FEATURE (13)..(13): X is M or Nle
  MISC_FEATURE (14)..(14): X is C or S
  MISC_FEATURE (15)..(15): X is K, R or H for basic amino acids
  MISC_FEATURE (16)..(16): X is I, L or V
  MISC_FEATURE (17)..(17): X is C or S
  MISC_FEATURE (18)..(18): X is K, R or H for basic amino acids
  MISC_FEATURE (19)..(19): X is A and G
  MISC_FEATURE (20)..(20): X is A and G
  MISC_FEATURE (21)..(21): X is A and G
  MISC_FEATURE (22)..(22): X is D and E for acidic amino acids
  MISC_FEATURE (23)..(23): X is I, L or V
  MISC_FEATURE (24)..(24): X is I, L or V
  MISC_FEATURE (25)..(25): X is K, R or H for basic amino acids
  MISC_FEATURE (26)..(26): X is N or Q for amidated amino acids
  MISC_FEATURE (27)..(27): X is A and G
  MISC_FEATURE (28)..(28): X is D and E for acidic amino acids
  MISC_FEATURE (29)..(29): X is K, R or H for basic amino acids
  MISC_FEATURE (30)..(30): X is I, L or V
  MISC_FEATURE (31)..(31): X is D and E for acidic amino acids
  MISC_FEATURE (32)..(32): X is K, R or H for basic amino acids
  MISC_FEATURE (33)..(33): X is I, L or V
  MISC_FEATURE (34)..(34): X is D and E for acidic amino acids

SEQ ID NO: 403 - protein, 36 aa, Artificial
  Completely synthesized peptide construct
NTNMFTYEIAPVFVLLEYVTGGGDLLKNGERIEKVE

SEQ ID NO: 404 - protein, 36 aa, Artificial; identical to SEQ ID NO: 164
  peptide construct
  MISC_FEATURE (1)..(1): X is N or Q for aromatic amino acids
  MISC_FEATURE (2)..(2): X is T or S
  MISC_FEATURE (3)..(3): X is N or Q for aromatic amino acids
  MISC_FEATURE (4)..(4): X is M or Nle
  MISC_FEATURE (5)..(5): X is F, W or Y for aromatic amino acids
  MISC_FEATURE (6)..(6): X is T or S
  MISC_FEATURE (7)..(7): X is F, W or  Y for aromatic amino acids
  MISC_FEATURE (8)..(8): X is D and E for acidic amino acids
  MISC_FEATURE (9)..(9): X is I, L or V
  MISC_FEATURE (10)..(10): X is A or G
  MISC_FEATURE (11)..(11): X is F or P
  MISC_FEATURE (12)..(12): X is I, L or V
  MISC_FEATURE (13)..(13): X is F, W or Y for aromatic amino acids
  MISC_FEATURE (14)..(14): X is I, L or V
  MISC_FEATURE (15)..(15): X is I, L or V
  MISC_FEATURE (16)..(16): X is I, L or V
  MISC_FEATURE (17)..(17): X is D and E for acidic amino acids
  MISC_FEATURE (18)..(18): X is F, W or Y for aromatic amino acids
  MISC_FEATURE (19)..(19): X is I, L or V
  MISC_FEATURE (20)..(20): X is T or S
  MISC_FEATURE (21)..(21): X is A and G
  MISC_FEATURE (22)..(22): X is A and G
  MISC_FEATURE (23)..(23): X is A and G
  MISC_FEATURE (24)..(24): X is D and E for acidic amino acids
  MISC_FEATURE (25)..(25): X is I, L or V
  MISC_FEATURE (26)..(26): X is I, L or V
  MISC_FEATURE (27)..(27): X is K, R or H for basic amino acids
  MISC_FEATURE (28)..(28): X is N or Q for amidated amino acids
  MISC_FEATURE (29)..(29): X is A and G
  MISC_FEATURE (30)..(30): X is D and E for acidic amino acids
  MISC_FEATURE (31)..(31): X is K, R or H for basic amino acids
  MISC_FEATURE (32)..(32): X is I, L or V
  MISC_FEATURE (33)..(33): X is D and E for acidic amino acids
  MISC_FEATURE (34)..(34): X is K, R or H for basic amino acids
  MISC_FEATURE (35)..(35): X is I, L or V
  MISC_FEATURE (36)..(36): X is D and E for acidic amino acids

SEQ ID NO: 405 - protein, 31 aa, Artificial
  Completely synthesized peptide construct
FKADEKKFWGKYLYEGGGDLLKNGERIEKVE

SEQ ID NO: 406 - protein, 31 aa, Artificial; identical to SEQ ID NO: 123
  peptide construct
  MISC_FEATURE (1)..(1): X is F, W or  Y for aromatic amino acids
  MISC_FEATURE (2)..(2): X is K, R or H for basic amino acids
  MISC_FEATURE (3)..(3): X is A or G
  MISC_FEATURE (4)..(4): X is D and E for acidic amino acids
  MISC_FEATURE (5)..(5): X is D and E for acidic amino acids
  MISC_FEATURE (6)..(6): X is K, R or H for basic amino acids
  MISC_FEATURE (7)..(7): X is K, R or H for basic amino acids
  MISC_FEATURE (8)..(8): X is F, W or Y for aromatic amino acids
  MISC_FEATURE (9)..(9): X is F, W or Y for aromatic amino acids
  MISC_FEATURE (10)..(10): X is A or G
  MISC_FEATURE (11)..(11): X is K, R or H for basic amino acids
  MISC_FEATURE (12)..(12): X is F, W or Y for aromatic amino acids
  MISC_FEATURE (13)..(13): X is I, L or V
  MISC_FEATURE (14)..(14): X is F, W or Y for aromatic amino acids
  MISC_FEATURE (15)..(15): X is D and E for acidic amino acids
  MISC_FEATURE (16)..(16): X is A and G
  MISC_FEATURE (17)..(17): X is A and G
  MISC_FEATURE (18)..(18): X is A and G
  MISC_FEATURE (19)..(19): X is D and E for acidic amino acids
  MISC_FEATURE (20)..(20): X is I, L or V
  MISC_FEATURE (21)..(21): X is I, L or V
  MISC_FEATURE (22)..(22): X is K, R or H for basic amino acids
  MISC_FEATURE (23)..(23): X is N or Q for amidated amino acids
  MISC_FEATURE (24)..(24): X is A and G
  MISC_FEATURE (25)..(25): X is D and E for acidic amino acids
  MISC_FEATURE (26)..(26): X is K, R or H for basic amino acids
  MISC_FEATURE (27)..(27): X is I, L or V
  MISC_FEATURE (28)..(28): X is D and E for acidic amino acids
  MISC_FEATURE (29)..(29): X is K, R or H for basic amino acids
  MISC_FEATURE (30)..(30): X is I, L or V
  MISC_FEATURE (31)..(31): X is D and E for acidic amino acids

SEQ ID NO: 407 - protein, 31 aa, Artificial
  Completely synthesized peptide construct
SHLVEALYLVCGERGGGGDLLKNGERIEKVE

SEQ ID NO: 408 - protein, 30 aa, Artificial; identical to SEQ ID NO: 56
  peptide construct
  MISC_FEATURE (1)..(1): X is C or S
  MISC_FEATURE (2)..(2): X is K, R or H for basic amino acids
  MISC_FEATURE (3)..(3): X is I, L or V
  MISC_FEATURE (4)..(4): X is I, L or V
  MISC_FEATURE (5)..(5): X is D and  E for acidic amino acids
  MISC_FEATURE (6)..(6): X is A or G
  MISC_FEATURE (7)..(7): X is I, L or V
  MISC_FEATURE (8)..(8): X is F, W or Y for aromatic amino acids
  MISC_FEATURE (9)..(9): X is I, L or V
  MISC_FEATURE (10)..(10): X is C or S
  MISC_FEATURE (11)..(11): X is A or G
  MISC_FEATURE (12)..(12): X is D and E for acidic amino acids
  MISC_FEATURE (13)..(13): X is K, R or H for basic amino acids
  MISC_FEATURE (14)..(14): X is A or G
  MISC_FEATURE (15)..(15): X is A and G
  MISC_FEATURE (16)..(16): X is A and G
  MISC_FEATURE (17)..(17): X is A and G
  MISC_FEATURE (18)..(18): X is D and E for acidic amino acids
  MISC_FEATURE (19)..(19): X is I, L or V
  MISC_FEATURE (20)..(20): X is I, L or V
  MISC_FEATURE (21)..(21): X is K, R or H for basic amino acids
  MISC_FEATURE (22)..(22): X is N or Q for amidated amino acids
  MISC_FEATURE (23)..(23): X is A and G
  MISC_FEATURE (24)..(24): X is D and E for acidic amino acids
  MISC_FEATURE (25)..(25): X is K, R or H for basic amino acids
  MISC_FEATURE (26)..(26): X is I, L or V
  MISC_FEATURE (27)..(27): X is D and E for acidic amino acids
  MISC_FEATURE (28)..(28): X is K, R or H for basic amino acids
  MISC_FEATURE (29)..(29): X is I, L or V
  MISC_FEATURE (30)..(30): X is D and E for acidic amino acids

SEQ ID NO: 409 - protein, 40 aa, Artificial
  Completely synthesized peptide construct
VLGGGCALLRCIPALDSLTPANEDGGGDLLKNGERIEKVE

SEQ ID NO: 410 - protein, 40 aa, Artificial; identical to SEQ ID NO: 52
  peptide construct
  MISC_FEATURE (1)..(1): X is I, L or V
  MISC_FEATURE (2)..(2): X is I, L or V
  MISC_FEATURE (3)..(3): X is A or G
  MISC_FEATURE (4)..(4): X is A or G
  MISC_FEATURE (5)..(5): X is A or G
  MISC_FEATURE (6)..(6): X is C or S
  MISC_FEATURE (7)..(7): X is A or G
  MISC_FEATURE (8)..(8): X is I, L or V
  MISC_FEATURE (9)..(9): X is I, L or V
  MISC_FEATURE (10)..(10): X is K, R or H for basic amino acids
  MISC_FEATURE (11)..(11): X is C or S
  MISC_FEATURE (12)..(12): X is I, L or V
  MISC_FEATURE (13)..(13): X is F or P
  MISC_FEATURE (14)..(14): X is A or G
  MISC_FEATURE (15)..(15): X is I, L or V
  MISC_FEATURE (16)..(16): X is D and E for acidic amino acids
  MISC_FEATURE (17)..(17): X is C or S
  MISC_FEATURE (18)..(18): X is I, L or V
  MISC_FEATURE (19)..(19): X is T or S
  MISC_FEATURE (20)..(20): X is F or P
  MISC_FEATURE (21)..(21): X is A or G
  MISC_FEATURE (22)..(22): X is N or Q for amidated amino acids
  MISC_FEATURE (23)..(23): X is D and E for acidic amino acids
  MISC_FEATURE (24)..(24): X is D and E for acidic amino acids
  MISC_FEATURE (25)..(25): X is A and G
  MISC_FEATURE (26)..(26): X is A and G
  MISC_FEATURE (27)..(27): X is A and G
  MISC_FEATURE (28)..(28): X is D and E for acidic amino acids
  MISC_FEATURE (29)..(29): X is I, L or V
  MISC_FEATURE (30)..(30): X is I, L or V
  MISC_FEATURE (31)..(31): X is K, R or H for basic amino acids
  MISC_FEATURE (32)..(32): X is N or Q for amidated amino acids
  MISC_FEATURE (33)..(33): X is A and G
  MISC_FEATURE (34)..(34): X is D and E for acidic amino acids
  MISC_FEATURE (35)..(35): X is K, R or H for basic amino acids
  MISC_FEATURE (36)..(36): X is I, L or V
  MISC_FEATURE (37)..(37): X is D and E for acidic amino acids
  MISC_FEATURE (38)..(38): X is K, R or H for basic amino acids
  MISC_FEATURE (39)..(39): X is I, L or V
  MISC_FEATURE (40)..(40): X is D and E for acidic amino acids

SEQ ID NO: 411 - protein, 44 aa, Artificial
  Completely synthesized peptide construct
EACVTSWLWSGEGAVFYRVDLHFINLGTGGGDLLKNGERIEKVE

SEQ ID NO: 412 - protein, 44 aa, Artificial; identical to SEQ ID NO: 294
  peptide construct
  MISC_FEATURE (1)..(1): X is D and E for acidic amino acids
  MISC_FEATURE (2)..(2): X is A or G
  MISC_FEATURE (3)..(3): X is C or S
  MISC_FEATURE (4)..(4): X is I, L or V
  MISC_FEATURE (5)..(5): X is T or S
  MISC_FEATURE (6)..(6): X is C or S
  MISC_FEATURE (7)..(7): X is F, W or Y for aromatic amino acids
  MISC_FEATURE (8)..(8): X is I, L or V
  MISC_FEATURE (9)..(9): X is F, W or Y for aromatic amino acids
  MISC_FEATURE (10)..(10): X is C or S
  MISC_FEATURE (11)..(11): X is A or G
  MISC_FEATURE (12)..(12): X is D and E for acidic amino acids
  MISC_FEATURE (13)..(13): X is A or G
  MISC_FEATURE (14)..(14): X is A or G
  MISC_FEATURE (15)..(15): X is I, L or V
  MISC_FEATURE (16)..(16): X is F, W or Y for aromatic amino acids
  MISC_FEATURE (17)..(17): X is F, W or Y for aromatic amino acids
  MISC_FEATURE (18)..(18): X is K, R or H for basic amino acids
  MISC_FEATURE (19)..(19): X is I, L or V
  MISC_FEATURE (20)..(20): X is D and E for acidic amino acids
  MISC_FEATURE (21)..(21): X is I, L or V
  MISC_FEATURE (22)..(22): X is K, R or H for basic amino acids
  MISC_FEATURE (23)..(23): X is F, W or Y for aromatic amino acids
  MISC_FEATURE (24)..(24): X is I, L or V
  MISC_FEATURE (25)..(25): X is N or Q for amidated amino acids
  MISC_FEATURE (26)..(26): X is I, L or V
  MISC_FEATURE (27)..(27): X is A or G
  MISC_FEATURE (28)..(28): X is T or S
  MISC_FEATURE (29)..(29): X is A and G
  MISC_FEATURE (30)..(30): X is A and G
  MISC_FEATURE (31)..(31): X is A and G
  MISC_FEATURE (32)..(32): X is D and E for acidic amino acids
  MISC_FEATURE (33)..(33): X is I, L or V
  MISC_FEATURE (34)..(34): X is I, L or V
  MISC_FEATURE (35)..(35): X is K, R or H for basic amino acids
  MISC_FEATURE (36)..(36): X is N or Q for amidated amino acids
  MISC_FEATURE (37)..(37): X is A and G
  MISC_FEATURE (38)..(38): X is D and  E for acidic amino acids
  MISC_FEATURE (39)..(39): X is K, R or H for basic amino acids
  MISC_FEATURE (40)..(40): X is I, L or V
  MISC_FEATURE (41)..(41): X is D and E for acidic amino acids
  MISC_FEATURE (42)..(42): X is K, R or H for basic amino acids
  MISC_FEATURE (43)..(43): X is I, L or V
  MISC_FEATURE (44)..(44): X is D and E for acidic amino acids

SEQ ID NO: 413 - protein, 37 aa, Artificial
  Completely synthesized peptide construct
MDFWCVEHDRPPPATPTSLTTGGGDLLKNGERIEKVE

SEQ ID NO: 414 - protein, 37 aa, Artificial; identical to SEQ ID NO: 151
  peptide construct
  MISC_FEATURE (1)..(1): X is M or Nle
  MISC_FEATURE (2)..(2): X is D and E for acidic amino acids
  MISC_FEATURE (3)..(3): X is F, W or Y for aromatic amino acids
  MISC_FEATURE (4)..(4): X is F, W or Y for aromatic amino acids
  MISC_FEATURE (5)..(5): X is C or S
  MISC_FEATURE (6)..(6): X is I, L or V
  MISC_FEATURE (7)..(7): X is D and E for acidic amino acids
  MISC_FEATURE (8)..(8): X is K, R or H for basic amino acids
  MISC_FEATURE (9)..(9): X is D and E for acidic amino acids
  MISC_FEATURE (10)..(10): X is K, R or H for basic amino acids
  MISC_FEATURE (11)..(11): X is F or P
  MISC_FEATURE (12)..(12): X is F or P
  MISC_FEATURE (13)..(13): X is F or P
  MISC_FEATURE (14)..(14): X is A or G
  MISC_FEATURE (15)..(15): X is T or S
  MISC_FEATURE (16)..(16): X is F or P
  MISC_FEATURE (17)..(17): X is T or S
  MISC_FEATURE (18)..(18): X is C or S
  MISC_FEATURE (19)..(19): X is I, L or V
  MISC_FEATURE (20)..(20): X is T or S
  MISC_FEATURE (21)..(21): X is T or S
  MISC_FEATURE (22)..(22): X is A and G
  MISC_FEATURE (23)..(23): X is A and G
  MISC_FEATURE (24)..(24): X is A and G
  MISC_FEATURE (25)..(25): X is D and E for acidic amino acids
  MISC_FEATURE (26)..(26): X is I, L or V
  MISC_FEATURE (27)..(27): X is I, L or V
  MISC_FEATURE (28)..(28): X is K, R or H for basic amino acids
  MISC_FEATURE (29)..(29): X is  N or Q for amidated amino acids
  MISC_FEATURE (30)..(30): X is A and G
  MISC_FEATURE (31)..(31): X is D and E for acidic amino acids
  MISC_FEATURE (32)..(32): X is K, R or H for basic amino acids
  MISC_FEATURE (33)..(33): X is I, L or V
  MISC_FEATURE (34)..(34): X is D and E for acidic amino acids
  MISC_FEATURE (35)..(35): X is K, R or H for basic amino acids
  MISC_FEATURE (36)..(36): X is I, L or V
  MISC_FEATURE (37)..(37): X is D and E for acidic amino acids

SEQ ID NO: 415 - protein, 36 aa, Artificial
  Completely synthesized peptide construct
NMYAMMIARFKMFPEVKEKGGGGDLLKNGERIEKVE

SEQ ID NO: 416 - protein, 36 aa, Artificial; identical to SEQ ID NO: 164
  peptide construct
  MISC_FEATURE (1)..(1): X is N or Q for amidated amino acids
  MISC_FEATURE (2)..(2): X is M or Nle
  MISC_FEATURE (3)..(3): X is F, W or Y for aromatic amino acids
  MISC_FEATURE (4)..(4): X is A or G
  MISC_FEATURE (5)..(5): X is M or Nle
  MISC_FEATURE (6)..(6): X is M or Nle
  MISC_FEATURE (7)..(7): X is I, L or V
  MISC_FEATURE (8)..(8): X is A or G
  MISC_FEATURE (9)..(9): X is K, R or H for basic amino acids
  MISC_FEATURE (10)..(10): X is F, W or Y for aromatic amino acids
  MISC_FEATURE (11)..(11): X is K,  R or H for basic amino acids
  MISC_FEATURE (12)..(12): X is M or Nle
  MISC_FEATURE (13)..(13): X is F, W or Y for aromatic amino acids
  MISC_FEATURE (14)..(14): X is F or P
  MISC_FEATURE (15)..(15): X is D and E for acidic amino acids
  MISC_FEATURE (16)..(16): X is I, L or V
  MISC_FEATURE (17)..(17): X is K, R or H for basic amino acids
  MISC_FEATURE (18)..(18): X is D and E for acidic amino acids
  MISC_FEATURE (19)..(19): X is K, R or H for basic amino acids
  MISC_FEATURE (20)..(20): X is A or G
  MISC_FEATURE (21)..(21): X is A and G
  MISC_FEATURE (22)..(22): X is A and G
  MISC_FEATURE (23)..(23): X is A and G
  MISC_FEATURE (24)..(24): X is D and E for acidic amino acids
  MISC_FEATURE (25)..(25): X is I, L or V
  MISC_FEATURE (26)..(26): X is I, L or V
  MISC_FEATURE (27)..(27): X is K, R or H for basic amino acids
  MISC_FEATURE (28)..(28): X is N or Q for amidated amino acids
  MISC_FEATURE (29)..(29): X is A and G
  MISC_FEATURE (30)..(30): X is D and E for acidic amino acids
  MISC_FEATURE (31)..(31): X is K, R or H for basic amino acids
  MISC_FEATURE (32)..(32): X is I, L or V
  MISC_FEATURE (33)..(33): X is D and E for acidic amino acids
  MISC_FEATURE (34)..(34): X is K, R or H for basic amino acids
  MISC_FEATURE (35)..(35): X is D and E for acidic amino acids
  MISC_FEATURE (36)..(36): X is I, L or V

SEQ ID NO: 417 - protein, 49 aa, Artificial
  Completely synthesized peptide construct
NMYAMMIARFKMFPEVKEKGMAALPRLIAFTSEGGGDLLKNGERIEKVE

SEQ ID NO: 418 - protein, 49 aa, Artificial; identical to SEQ ID NO: 338
  peptide construct
  MISC_FEATURE (1)..(1): X is N or Q for amidated amino acids
  MISC_FEATURE (2)..(2): X is M or Nle
  MISC_FEATURE (3)..(3): X is F, W or Y for aromatic amino acids
  MISC_FEATURE (4)..(4): X is A or G
  MISC_FEATURE (5)..(5): X is M or Nle
  MISC_FEATURE (6)..(6): X is M or Nle
  MISC_FEATURE (7)..(7): X is I, L or V
  MISC_FEATURE (8)..(8): X is A or G
  MISC_FEATURE (9)..(9): X is K, R or H for basic amino acids
  MISC_FEATURE (10)..(10): X is F, W or Y for aromatic amino acids
  MISC_FEATURE (11)..(11): X is K, R or H for basic amino acids
  MISC_FEATURE (12)..(12): X is M or Nle
  MISC_FEATURE (13)..(13): X is F, W or Y for aromatic amino acids
  MISC_FEATURE (14)..(14): X is F or P
  MISC_FEATURE (15)..(15): X is D and E for acidic amino acids
  MISC_FEATURE (16)..(16): X is I, L or V
  MISC_FEATURE (17)..(17): X is K, R or H for basic amino acids
  MISC_FEATURE (18)..(18): X is D and E for acidic amino acids
  MISC_FEATURE (19)..(19): X is K, R or H for basic amino acids
  MISC_FEATURE (20)..(20): X is A or G
  MISC_FEATURE (21)..(21): X is M or Nle
  MISC_FEATURE (22)..(22): X is A or G
  MISC_FEATURE (23)..(23): X is A or G
  MISC_FEATURE (24)..(24): X is I, L or V
  MISC_FEATURE (25)..(25): X is F or P
  MISC_FEATURE (26)..(26): X is K, R or H for basic amino acids
  MISC_FEATURE (27)..(27): X is I, L or V
  MISC_FEATURE (28)..(28): X is I, L or V
  MISC_FEATURE (29)..(29): X is A or G
  MISC_FEATURE (30)..(30): X is F, W or Y for aromatic amino acids
  MISC_FEATURE (31)..(31): X is T or S
  MISC_FEATURE (32)..(32): X is C or S
  MISC_FEATURE (33)..(33): X is D and E for acidic amino acids
  MISC_FEATURE (34)..(34): X is A and G
  MISC_FEATURE (35)..(35): X is A and G
  MISC_FEATURE (36)..(36): X is A and G
  MISC_FEATURE (37)..(37): X is D and E for acidic amino acids
  MISC_FEATURE (38)..(38): X is I, L or V
  MISC_FEATURE (39)..(39): X is I, L or V
  MISC_FEATURE (40)..(40): X is K, R or H for basic amino acids
  MISC_FEATURE (41)..(41): X is N or Q for amidated amino acids
  MISC_FEATURE (42)..(42): X is A and G
  MISC_FEATURE (43)..(43): X is D and E for acidic amino acids
  MISC_FEATURE (44)..(44): X is K, R or H for basic amino acids
  MISC_FEATURE (45)..(45): X is I, L or V
  MISC_FEATURE (46)..(46): X is D and E for acidic amino acids
  MISC_FEATURE (47)..(47): X is K, R or H for basic amino acids
  MISC_FEATURE (48)..(48): X is I, L or V
  MISC_FEATURE (49)..(49): X is D and E for acidic amino acids

SEQ ID NO: 419 - protein, 29 aa, Artificial
  Completely synthesized peptide construct
IAFTSEHSHFSLKGGGDLLKNGERIEKVE

SEQ ID NO: 420 - protein, 29 aa, Artificial
  peptide construct
  MISC_FEATURE (1)..(1): X is I, L or V
  MISC_FEATURE (2)..(2): X is A or G
  MISC_FEATURE (3)..(3): X is F, W or Y for aromatic amino acids
  MISC_FEATURE (4)..(4): X is T or S
  MISC_FEATURE (5)..(5): X is C or S
  MISC_FEATURE (6)..(6): X is D and E for acidic amino acids
  MISC_FEATURE (7)..(7): X is K, R or H for basic amino acids
  MISC_FEATURE (8)..(8): X is C or S
  MISC_FEATURE (9)..(9): X is K, R or H for basic amino acids
  MISC_FEATURE (10)..(10): X is F, W or Y for aromatic amino acids
  MISC_FEATURE (11)..(11): X is C or S
  MISC_FEATURE (12)..(12): X is I, L or V
  MISC_FEATURE (13)..(13): X is K, R or H for basic amino acids
  MISC_FEATURE (14)..(14): X is A and G
  MISC_FEATURE (15)..(15): X is A and G
  MISC_FEATURE (16)..(16): X is A and G
  MISC_FEATURE (17)..(17): X is D and E for acidic amino acids
  MISC_FEATURE (18)..(18): X is I, L or V
  MISC_FEATURE (19)..(19): X is I, L or V
  MISC_FEATURE (20)..(20): X is K, R or H for basic amino acids
  MISC_FEATURE (21)..(21): X is N or Q for amidated amino acids
  MISC_FEATURE (22)..(22): X is A and G
  MISC_FEATURE (23)..(23): X is D and E for acidic amino acids
  MISC_FEATURE (24)..(24): X is K, R or H for basic amino acids
  MISC_FEATURE (25)..(25): X is I, L or V
  MISC_FEATURE (26)..(26): X is D and E for acidic amino acids
  MISC_FEATURE (27)..(27): X is K, R or H for basic amino acids
  MISC_FEATURE (28)..(28): X is I, L or V
  MISC_FEATURE (29)..(29): X is D and E for acidic amino acids
XXXXXXXXXXXXXXXXXXXXXXXXXXXXX

SEQ ID NO: 421 - protein, 37 aa, Artificial; identical to SEQ ID NO: 151
  peptide construct
  MISC_FEATURE (1)..(1): X is M or Nle
  MISC_FEATURE (2)..(2): X is D and E for acidic amino acids
  MISC_FEATURE (3)..(3): X is F, W or Y for aromatic amino acids
  MISC_FEATURE (4)..(4): X is F, W or Y for aromatic amino acids
  MISC_FEATURE (5)..(5): X is C or S
  MISC_FEATURE (6)..(6): X is I, L or V
  MISC_FEATURE (7)..(7): X is D and E for acidic amino acids
  MISC_FEATURE (8)..(8): X is K, R or H for basic amino acids
  MISC_FEATURE (9)..(9): X is D and E for acidic amino acids
  MISC_FEATURE (10)..(10): X is K, R or H for basic amino acids
  MISC_FEATURE (11)..(11): X is F or P
  MISC_FEATURE (12)..(12): X is F or P
  MISC_FEATURE (13)..(13): X is F or P
  MISC_FEATURE (14)..(14): X is A or G
  MISC_FEATURE (15)..(15): X is T or S
  MISC_FEATURE (16)..(16): X is F or P
  MISC_FEATURE (17)..(17): X is T or S
  MISC_FEATURE (18)..(18): X is C or S
  MISC_FEATURE (19)..(19): X is I, L or V
  MISC_FEATURE (20)..(20): X is T or S
  MISC_FEATURE (21)..(21): X is T or S
  MISC_FEATURE (22)..(22): X  is A and G
  MISC_FEATURE (23)..(23): X is A and G
  MISC_FEATURE (24)..(24): X is A and G
  MISC_FEATURE (25)..(25): X is D and E for acidic amino acids
  MISC_FEATURE (26)..(26): X is I, L or V
  MISC_FEATURE (27)..(27): X is  I, L or V
  MISC_FEATURE (28)..(28): X is K, R or H for basic amino acids
  MISC_FEATURE (29)..(29): X is N or Q for amidated amino acids
  MISC_FEATURE (30)..(30): X is A and G
  MISC_FEATURE (31)..(31): X is D and E for acidic amino acids
  MISC_FEATURE (32)..(32): X is K, R or H for basic amino acids
  MISC_FEATURE (33)..(33): X is I, L or V
  MISC_FEATURE (34)..(34): X is D and E for acidic amino acids
  MISC_FEATURE (35)..(35): X is K, R or H for basic amino acids
  MISC_FEATURE (36)..(36): X is I, L or V
  MISC_FEATURE (37)..(37): X is D and E for acidic amino acids

SEQ ID NO: 422 - protein, 26 aa, Artificial
  Completely synthesized peptide construct
ERPTLAFLQDGGGDLLKNGERIEKVE

SEQ ID NO: 423 - protein, 26 aa, Artificial
  peptide construct
  MISC_FEATURE (1)..(1): X is D and E for acidic amino acids
  MISC_FEATURE (2)..(2): X is K, R or H for basic amino acids
  MISC_FEATURE (3)..(3): X is F or P
  MISC_FEATURE (4)..(4): X is T or S
  MISC_FEATURE (5)..(5): X is I, L or V
  MISC_FEATURE (6)..(6): X is A or G
  MISC_FEATURE (7)..(7): X is F, W or Y for aromatic amino acids
  MISC_FEATURE (8)..(8): X is I, L or V
  MISC_FEATURE (9)..(9): X is N or Q for amidated amino acids
  MISC_FEATURE (10)..(10): X is D and E for acidic amino acids
  MISC_FEATURE (11)..(11): X is A and G
  MISC_FEATURE (12)..(12): X is A and G
  MISC_FEATURE (13)..(13): X is A and G
  MISC_FEATURE (14)..(14): X is D and E for acidic amino acids
  MISC_FEATURE (15)..(15): X is I, L or V
  MISC_FEATURE (16)..(16): X is I, L or V
  MISC_FEATURE (17)..(17): X is K, R or H for basic amino acids
  MISC_FEATURE (18)..(18): X is N or Q for amidated amino acids
  MISC_FEATURE (19)..(19): X is A and G
  MISC_FEATURE (20)..(20): X is D and E for acidic amino acids
  MISC_FEATURE (21)..(21): X is K, R or H for basic amino acids
  MISC_FEATURE (22)..(22): X is I, L or V
  MISC_FEATURE (23)..(23): X is D and E for acidic amino acids
  MISC_FEATURE (24)..(24): X is K, R or H for basic amino acids
  MISC_FEATURE (25)..(25): X is I, L or V
  MISC_FEATURE (26)..(26): X is D and E for acidic amino acids
XXXXXXXXXXXXXXXXXXXXXXXXXX

SEQ ID NO: 424 - protein, 26 aa, Artificial
  Completely synthesized peptide construct
DRSTKVIDFHGGGDLLKNGERIEKVE

SEQ ID NO: 425 - protein, 26 aa, Artificial
  peptide construct
  MISC_FEATURE (1)..(1): X is D and E for acidic amino acids
  MISC_FEATURE (2)..(2): X is K, R or H for basic amino acids
  MISC_FEATURE (3)..(3): X is C or S
  MISC_FEATURE (4)..(4): X is T or S
  MISC_FEATURE (5)..(5): X is K, R or H for basic amino acids
  MISC_FEATURE (6)..(6): X is I, L or V
  MISC_FEATURE (7)..(7): X is I, L or V
  MISC_FEATURE (8)..(8): X is D and E for acidic amino acids
  MISC_FEATURE (9)..(9): X is F, W or Y for aromatic amino acids
  MISC_FEATURE (10)..(10): X is K, R or H for basic amino acids
  MISC_FEATURE (11)..(11): X is A and G
  MISC_FEATURE (12)..(12): X is A and G
  MISC_FEATURE (13)..(13): X is A and G
  MISC_FEATURE (14)..(14): X is D and E for acidic amino acids
  MISC_FEATURE (15)..(15): X is I, L or V
  MISC_FEATURE (16)..(16): X is I, L or V
  MISC_FEATURE (17)..(17): X is K, R or H for basic amino acids
  MISC_FEATURE (18)..(18): X is N or Q for amidated amino acids
  MISC_FEATURE (19)..(19): X is A and G
  MISC_FEATURE (20)..(20): X is D and E for acidic amino acids
  MISC_FEATURE (21)..(21): X is K, R or H for basic amino acids
  MISC_FEATURE (22)..(22): X is I, L or V
  MISC_FEATURE (23)..(23): X is D and E for acidic amino acids
  MISC_FEATURE (24)..(24): X is K, R or H for basic amino acids
  MISC_FEATURE (25)..(25): X is I, L or V
  MISC_FEATURE (26)..(26): X is D and E for acidic amino acids
XXXXXXXXXXXXXXXXXXXXXXXXXX

SEQ ID NO: 426 - protein, 29 aa, Artificial
  peptide construct
  MISC_FEATURE (1)..(1): X is I, L or V
  MISC_FEATURE (2)..(2): X is  A or G
  MISC_FEATURE (3)..(3): X is  A or G
  MISC_FEATURE (4)..(4): X is F, W or Y for aromatic amino acids
  MISC_FEATURE (5)..(5): X is K, R or H for basic amino acids
  MISC_FEATURE (6)..(6): X is A or G
  MISC_FEATURE (7)..(7): X is D and E for acidic amino acids
  MISC_FEATURE (8)..(8): X is N or Q for amidated amino acids
  MISC_FEATURE (9)..(9): X is A or G
  MISC_FEATURE (10)..(10): X is F or P
  MISC_FEATURE (11)..(11): X is K, R or H for basic amino acids
  MISC_FEATURE (12)..(12): X is A or G
  MISC_FEATURE (13)..(13): X is D and E for acidic amino acids
  MISC_FEATURE (14)..(14): X is A and G
  MISC_FEATURE (15)..(15): X is A and G
  MISC_FEATURE (16)..(16): X is A and G
  MISC_FEATURE (17)..(17): X is D and E for acidic amino acids
  MISC_FEATURE (18)..(18): X is I, L or V
  MISC_FEATURE (19)..(19): X is I, L or V
  MISC_FEATURE (20)..(20): X is K, R or H for basic amino acids
  MISC_FEATURE (21)..(21): X is N or Q for amidated amino acids
  MISC_FEATURE (22)..(22): X is A and G
  MISC_FEATURE (23)..(23): X is D and E for acidic amino acids
  MISC_FEATURE (24)..(24): X is K, R or H for basic amino acids
  MISC_FEATURE (25)..(25): X is I, L or V
  MISC_FEATURE (26)..(26): X is D and E for acidic amino acids
  MISC_FEATURE (27)..(27): X is K, R or H for basic amino acids
  MISC_FEATURE (28)..(28): X is I, L or V
  MISC_FEATURE (29)..(29): X is D and E for acidic amino acids
XXXXXXXXXXXXXXXXXXXXXXXXXXXXX

SEQ ID NO: 427 - protein, 16 aa, Artificial
  Completely synthesized peptide construct
GGGDLLKNGERIEKVE

SEQ ID NO: 428 - protein, 16 aa, Artificial
  peptide construct
  MISC_FEATURE (1)..(1): X is A and G
  MISC_FEATURE (2)..(2): X is A and G
  MISC_FEATURE (3)..(3): X is A and G
  MISC_FEATURE (4)..(4): X is D and E for acidic amino acids
  MISC_FEATURE (5)..(5): X is I, L or V
  MISC_FEATURE (6)..(6): X is I, L or V
  MISC_FEATURE (7)..(7): X is K, R or H for basic amino acids
  MISC_FEATURE (8)..(8): X is N or Q for amidated amino acids
  MISC_FEATURE (9)..(9): X is A and G
  MISC_FEATURE (10)..(10): X is D and E for acidic amino acids
  MISC_FEATURE (11)..(11): X is K, R or H for basic amino acids
  MISC_FEATURE (12)..(12): X is I, L or V
  MISC_FEATURE (13)..(13): X is D and E for acidic amino acids
  MISC_FEATURE (14)..(14): X is K, R or H for basic amino acids
  MISC_FEATURE (15)..(15): X is I, L or V
  MISC_FEATURE (16)..(16): X is D and E for acidic amino acids
XXXXXXXXXXXXXXXX

SEQ ID NO: 429 - protein, 24 aa, Artificial
  Completely synthesized peptide construct
KNIVTPRTGGGDLLKNGERIEKVE

SEQ ID NO: 430 - protein, 24 aa, Artificial
  peptide construct
  MISC_FEATURE (1)..(1): X is K, R or H for basic amino acids
  MISC_FEATURE (2)..(2): X is N or Q for amidated amino acids
  MISC_FEATURE (3)..(3): X is I, L or V
  MISC_FEATURE (4)..(4): X is I, L or V
  MISC_FEATURE (5)..(5): X is T or S
  MISC_FEATURE (6)..(6): X is F or P
  MISC_FEATURE (7)..(7): X is K, R or H for basic amino acids
  MISC_FEATURE (8)..(8): X is T or S
  MISC_FEATURE (9)..(9): X is A and G
  MISC_FEATURE (10)..(10): X is A and G
  MISC_FEATURE (11)..(11): X is A and G
  MISC_FEATURE (12)..(12): X is D and E for acidic amino acids
  MISC_FEATURE (13)..(13): X is I, L or V
  MISC_FEATURE (14)..(14): X is I, L or V
  MISC_FEATURE (15)..(15): X is K, R or H for basic amino acids
  MISC_FEATURE (16)..(16): X is N or Q for amidated amino acids
  MISC_FEATURE (17)..(17): X is A and G
  MISC_FEATURE (18)..(18): X is D and E for acidic amino acids
  MISC_FEATURE (19)..(19): X is K, R or H for basic amino acids
  MISC_FEATURE (20)..(20): X is I, L or V
  MISC_FEATURE (21)..(21): X is D and E for acidic amino acids
  MISC_FEATURE (22)..(22): X is K, R or H for basic amino acids
  MISC_FEATURE (23)..(23): X is I, L or V
  MISC_FEATURE (24)..(24): X is D and E for acidic amino acids
XXXXXXXXXXXXXXXXXXXXXXXX

SEQ ID NO: 431 - protein, 31 aa, Artificial
  Completely synthesized peptide construct
GDKVSFFCKNKEKKCGGGDLLKNGERIEKVE

SEQ ID NO: 432 - protein, 31 aa, Artificial; identical to SEQ ID NO: 123
  peptide construct
  MISC_FEATURE (1)..(1): X is A or G
  MISC_FEATURE (2)..(2): X is D and E for acidic amino acids
  MISC_FEATURE (3)..(3): X is K, R or H for basic amino acids
  MISC_FEATURE (4)..(4): X is I, L or V
  MISC_FEATURE (5)..(5): X is C or S
  MISC_FEATURE (6)..(6): X is F, W or Y for aromatic amino acids
  MISC_FEATURE (7)..(7): X is F, W or Y for aromatic amino acids
  MISC_FEATURE (8)..(8): X is C or S
  MISC_FEATURE (9)..(9): X is K, R or H for basic amino acids
  MISC_FEATURE (10)..(10): X is N or Q for amidated amino acids
  MISC_FEATURE (11)..(11): X is K, R or H for basic amino acids
  MISC_FEATURE (12)..(12): X is D and E for acidic amino acids
  MISC_FEATURE (13)..(13): X is K, R or H for basic amino acids
  MISC_FEATURE (14)..(14): X is K, R or H for basic amino acids
  MISC_FEATURE (15)..(15): X is C or S
  MISC_FEATURE (16)..(16): X is A and G
  MISC_FEATURE (17)..(17): X is A and G
  MISC_FEATURE (18)..(18): X is A and G
  MISC_FEATURE (19)..(19): X is D and E for acidic amino acids
  MISC_FEATURE (20)..(20): X is I, L or V
  MISC_FEATURE (21)..(21): X is I, L or V
  MISC_FEATURE (22)..(22): X is K, R or H for basic amino acids
  MISC_FEATURE (23)..(23): X is N or Q for amidated amino acids
  MISC_FEATURE (24)..(24): X is A and G
  MISC_FEATURE (25)..(25): X is D and E for acidic amino acids
  MISC_FEATURE (26)..(26): X is K, R or H for basic amino acids
  MISC_FEATURE (27)..(27): X is I, L or V
  MISC_FEATURE (28)..(28): X is D and E for acidic amino acids
  MISC_FEATURE (29)..(29): X is K, R or H for basic amino acids
  MISC_FEATURE (30)..(30): X is I, L or V
  MISC_FEATURE (31)..(31): X is D and E for acidic amino acids

SEQ ID NO: 433 - protein, 33 aa, Artificial
  Completely synthesized peptide construct
EIIVTHFPFDEQNCSMKGGGDLLKNGERIEKVE

SEQ ID NO: 434 - protein, 33 aa, Artificial; identical to SEQ ID NO: 97
  peptide construct
  MISC_FEATURE (1)..(1): X is D and E for acidic amino acids
  MISC_FEATURE (2)..(2): X is I, L or V
  MISC_FEATURE (3)..(3): X is I, L or V
  MISC_FEATURE (4)..(4): X is I, L or V
  MISC_FEATURE (5)..(5): X is T or S
  MISC_FEATURE (6)..(6): X is K, R or H for basic amino acids
  MISC_FEATURE (7)..(7): X is F, W or Y for aromatic amino acids
  MISC_FEATURE (8)..(8): X is F or P
  MISC_FEATURE (9)..(9): X is F, W or Y for aromatic amino acids
  MISC_FEATURE (10)..(10): X is D and E for acidic amino acids
  MISC_FEATURE (11)..(11): X is D and E for acidic amino acids
  MISC_FEATURE (12)..(12): X is N or Q for amidated amino acids
  MISC_FEATURE (13)..(13): X is N or Q for amidated amino acids
  MISC_FEATURE (14)..(14): X is C or S
  MISC_FEATURE (15)..(15): X is C or S
  MISC_FEATURE (16)..(16): X is M or Nle
  MISC_FEATURE (17)..(17): X is K, R or H for basic amino acids
  MISC_FEATURE (18)..(18): X  is A and G
  MISC_FEATURE (19)..(19): X is A and G
  MISC_FEATURE (20)..(20): X is A and G
  MISC_FEATURE (21)..(21): X is D and E for acidic amino acids
  MISC_FEATURE (22)..(22): X is I, L or V
  MISC_FEATURE (23)..(23): X is I, L or V
  MISC_FEATURE (24)..(24): X is K, R or H for basic amino acids
  MISC_FEATURE (25)..(25): X is N or Q for amidated amino acids
  MISC_FEATURE (26)..(26): X is A and G
  MISC_FEATURE (27)..(27): X is D and E for acidic amino acids
  MISC_FEATURE (28)..(28): X is K, R or H for basic amino acids
  MISC_FEATURE (29)..(29): X is I, L or V
  MISC_FEATURE (30)..(30): X is D and E for acidic amino acids
  MISC_FEATURE (31)..(31): X is K, R or H for basic amino acids
  MISC_FEATURE (32)..(32): X is I, L or V
  MISC_FEATURE (33)..(33): X is D and E for acidic amino acids

SEQ ID NO: 435 - protein, 29 aa, Artificial
  Completely synthesized peptide construct
VHFFKNIVTPRTPGGGDLLKNGERIEKVE

SEQ ID NO: 436 - protein, 29 aa, Artificial
  peptide construct
  MISC_FEATURE (1)..(1): X is I, L or V
  MISC_FEATURE (2)..(2): X is K, R or H for basic amino acids
  MISC_FEATURE (3)..(3): X is F, W or Y for aromatic amino acids
  MISC_FEATURE (4)..(4): X is F, W or Y for aromatic amino acids
  MISC_FEATURE (5)..(5): X is K, R or H for basic amino acids
  MISC_FEATURE (6)..(6): X is N or Q for amidated amino acids
  MISC_FEATURE (7)..(7): X is I, L or V
  MISC_FEATURE (8)..(8): X is I, L or V
  MISC_FEATURE (9)..(9): X is T or S
  MISC_FEATURE (10)..(10): X is F or P
  MISC_FEATURE (11)..(11): X is K, R or H for basic amino acids
  MISC_FEATURE (12)..(12): X is T or S
  MISC_FEATURE (13)..(13): X is F or P
  MISC_FEATURE (14)..(14): X is A and G
  MISC_FEATURE (15)..(15): X is A and G
  MISC_FEATURE (16)..(16): X is A and G
  MISC_FEATURE (17)..(17): X is D and E for acidic amino acids
  MISC_FEATURE (18)..(18): X is I, L or V
  MISC_FEATURE (19)..(19): X is I, L or V
  MISC_FEATURE (20)..(20): X is K, R or H for basic amino acids
  MISC_FEATURE (21)..(21): X is N or Q for amidated amino acids
  MISC_FEATURE (22)..(22): X is A and G
  MISC_FEATURE (23)..(23): X is D and E for acidic amino acids
  MISC_FEATURE (24)..(24): X is K, R or H for basic amino acids
  MISC_FEATURE (25)..(25): X is I, L or V
  MISC_FEATURE (26)..(26): X is D and E for acidic amino acids
  MISC_FEATURE (27)..(27): X is K, R or H for basic amino acids
  MISC_FEATURE (28)..(28): X is I, L or V
  MISC_FEATURE (29)..(29): X is D and E for acidic amino acids
XXXXXXXXXXXXXXXXXXXXXXXXXXXXX

SEQ ID NO: 437 - protein, 33 aa, Artificial
  Completely synthesized peptide construct
YQQLNSERGVPNENIENGGGDLLKNGERIEKVE

SEQ ID NO: 438 - protein, 33 aa, Artificial; identical to SEQ ID NO: 97
  peptide construct
  MISC_FEATURE (1)..(1): X is F, W or Y for aromatic amino acids
  MISC_FEATURE (2)..(2): X is N or Q for amidated amino acids
  MISC_FEATURE (3)..(3): X is N or Q for amidated amino acids
  MISC_FEATURE (4)..(4): X is I, L or V
  MISC_FEATURE (5)..(5): X is N or Q for amidated amino acids
  MISC_FEATURE (6)..(6): X is C or S
  MISC_FEATURE (7)..(7): X is D and E for acidic amino acids
  MISC_FEATURE (8)..(8): X is K, R or H for basic amino acids
  MISC_FEATURE (9)..(9): X is A or G
  MISC_FEATURE (10)..(10): X is I, L or V
  MISC_FEATURE (11)..(11): X is F or P
  MISC_FEATURE (12)..(12): X is N or Q for amidated amino acids
  MISC_FEATURE (13)..(13): X is D and E for acidic amino acids
  MISC_FEATURE (14)..(14): X is N or Q for amidated amino acids
  MISC_FEATURE (15)..(15): X is I, L or V
  MISC_FEATURE (16)..(16): X is D and E for acidic amino acids
  MISC_FEATURE (17)..(17): X is N or Q for amidated amino acids
  MISC_FEATURE (18)..(18): X is A and G
  MISC_FEATURE (19)..(19): X is A and G
  MISC_FEATURE (20)..(20): X is A and G
  MISC_FEATURE (21)..(21): X is D and E for acidic amino acids
  MISC_FEATURE (22)..(22): X is I, L or V
  MISC_FEATURE (23)..(23): X is I, L or V
  MISC_FEATURE (24)..(24): X is K, R or H for basic amino acids
  MISC_FEATURE (25)..(25): X is N or Q for amidated amino acids
  MISC_FEATURE (26)..(26): X is A and G
  MISC_FEATURE (27)..(27): X is D and E for acidic amino acids
  MISC_FEATURE (28)..(28): X is K, R or H for basic amino acids
  MISC_FEATURE (29)..(29): X is I, L or V
  MISC_FEATURE (30)..(30): X is D and E for acidic amino acids
  MISC_FEATURE (31)..(31): X is K, R or H for basic amino acids
  MISC_FEATURE (32)..(32): X is I, L or V
  MISC_FEATURE (33)..(33): X is D and E for acidic amino acids

SEQ ID NO: 439 - protein, 29 aa, Artificial
  Completely synthesized peptide construct
VFIKRVSNVIIHGGGGDLLKNGERIEKVE

SEQ ID NO: 440 - protein, 29 aa, Artificial
  peptide construct
  MISC_FEATURE (1)..(1): X is I, L or V
  MISC_FEATURE (2)..(2): X is F, W or Y for aromatic amino acids
  MISC_FEATURE (3)..(3): X is I, L or V
  MISC_FEATURE (4)..(4): X is K, R or H for basic amino acids
  MISC_FEATURE (5)..(5): X is K, R or H for basic amino acids
  MISC_FEATURE (6)..(6): X is I, L or V
  MISC_FEATURE (7)..(7): X is C or S
  MISC_FEATURE (8)..(8): X is N or Q for amidated amino acids
  MISC_FEATURE (9)..(9): X is I, L or V
  MISC_FEATURE (10)..(10): X is I, L or V
  MISC_FEATURE (11)..(11): X is I, L or V
  MISC_FEATURE (12)..(12): X is K, R or H for basic amino acids
  MISC_FEATURE (13)..(13): X is A or G
  MISC_FEATURE (14)..(14): X is A and G
  MISC_FEATURE (15)..(15): X is A and G
  MISC_FEATURE (16)..(16): X is A and G
  MISC_FEATURE (17)..(17): X is D and E for acidic amino acids
  MISC_FEATURE (18)..(18): X is I, L or V
  MISC_FEATURE (19)..(19): X is I, L or V
  MISC_FEATURE (20)..(20): X is  K, R or H for basic amino acids
  MISC_FEATURE (21)..(21): X is N or Q for amidated amino acids
  MISC_FEATURE (22)..(22): X is A and G
  MISC_FEATURE (23)..(23): X is D and E for acidic amino acids
  MISC_FEATURE (24)..(24): X is K, R or H for basic amino acids
  MISC_FEATURE (25)..(25): X is I, L or V
  MISC_FEATURE (26)..(26): X is D and E for acidic amino acids
  MISC_FEATURE (27)..(27): X is K, R or H for basic amino acids
  MISC_FEATURE (28)..(28): X is I, L or V
  MISC_FEATURE (29)..(29): X is D and E for acidic amino acids
XXXXXXXXXXXXXXXXXXXXXXXXXXXXX

SEQ ID NO: 441 - protein, 31 aa, Artificial
  Completely synthesized peptide construct
MKVTVAFNQFGPNRRGGGDLLKNGERIEKVE

SEQ ID NO: 442 - protein, 31 aa, Artificial; identical to SEQ ID NO: 123
  peptide construct
  MISC_FEATURE (1)..(1): X is M or Nle
  MISC_FEATURE (2)..(2): X is K, R or H for basic amino acids
  MISC_FEATURE (3)..(3): X is I, L or V
  MISC_FEATURE (4)..(4): X is T or S
  MISC_FEATURE (5)..(5): X is I, L or V
  MISC_FEATURE (6)..(6): X is A or G
  MISC_FEATURE (7)..(7): X is F, W or Y for aromatic amino acids
  MISC_FEATURE (8)..(8): X is N or Q for amidated amino acids
  MISC_FEATURE (9)..(9): X is N or Q for amidated amino acids
  MISC_FEATURE (10)..(10): X is F, W or Y for amidated amino acids
  MISC_FEATURE (11)..(11): X is A or G
  MISC_FEATURE (12)..(12): X is F or P
  MISC_FEATURE (13)..(13): X is N or Q for amidated amino acids
  MISC_FEATURE (14)..(14): X is K, R or H for basic amino acids
  MISC_FEATURE (15)..(15): X is K, R or H for basic amino acids
  MISC_FEATURE (16)..(16): X is A and G
  MISC_FEATURE (17)..(17): X is A and G
  MISC_FEATURE (18)..(18): X is A and G
  MISC_FEATURE (19)..(19): X is D and E for acidic amino acids
  MISC_FEATURE (20)..(20): X is I, L or V
  MISC_FEATURE (21)..(21): X is I, L or V
  MISC_FEATURE (22)..(22): X is K, R or H for basic amino acids
  MISC_FEATURE (23)..(23): X is N or Q for amidated amino acids
  MISC_FEATURE (24)..(24): X is A and G
  MISC_FEATURE (25)..(25): X is D and E for acidic amino acids
  MISC_FEATURE (26)..(26): X is K, R or H for basic amino acids
  MISC_FEATURE (27)..(27): X is I, L or V
  MISC_FEATURE (28)..(28): X is D and E for acidic amino acids
  MISC_FEATURE (29)..(29): X is K, R or H for basic amino acids
  MISC_FEATURE (30)..(30): X is I, L or V
  MISC_FEATURE (31)..(31): X is D and E for acidic amino acids

SEQ ID NO: 443 - protein, 31 aa, Artificial
  Completely synthesized peptide construct
IASRRVDGIIAAYQNGGGDLLKNGERIEKVE

SEQ ID NO: 444 - protein, 31 aa, Artificial; identical to SEQ ID NO: 123
  peptide construct
  MISC_FEATURE (1)..(1): X is I, L or V
  MISC_FEATURE (2)..(2): X is A or G
  MISC_FEATURE (3)..(3): X is C or S
  MISC_FEATURE (4)..(4): X is K, R or H for basic amino acids
  MISC_FEATURE (5)..(5): X is K, R or H for basic amino acids
  MISC_FEATURE (6)..(6): X is I, L or V
  MISC_FEATURE (7)..(7): X is D and E for acidic amino acids
  MISC_FEATURE (8)..(8): X is A or G
  MISC_FEATURE (9)..(9): X is I, L or V
  MISC_FEATURE (10)..(10): X is I, L or V
  MISC_FEATURE (11)..(11): X is A or G
  MISC_FEATURE (12)..(12): X is A or G
  MISC_FEATURE (13)..(13): X is F, W or Y for aromatic amino acids
  MISC_FEATURE (14)..(14): X is N or Q for amidated amino acids
  MISC_FEATURE (15)..(15): X is N or Q for amidated amino acids
  MISC_FEATURE (16)..(16): X is A and G
  MISC_FEATURE (17)..(17): X is A and G
  MISC_FEATURE (18)..(18): X is A and G
  MISC_FEATURE (19)..(19): X is D and E for acidic amino acids
  MISC_FEATURE (20)..(20): X is I, L or V
  MISC_FEATURE (21)..(21): X is I, L or V
  MISC_FEATURE (22)..(22): X is K, R or H for basic amino acids
  MISC_FEATURE (23)..(23): X is N or Q for amidated amino acids
  MISC_FEATURE (24)..(24): X is A and G
  MISC_FEATURE (25)..(25): X is D and E for acidic amino acids
  MISC_FEATURE (26)..(26): X is K, R or H for basic amino acids
  MISC_FEATURE (27)..(27): X is I, L or V
  MISC_FEATURE (28)..(28): X is D and E for acidic amino acids
  MISC_FEATURE (29)..(29): X is K, R or H for basic amino acids
  MISC_FEATURE (30)..(30): X is I, L or V
  MISC_FEATURE (31)..(31): X is D and E for acidic amino acids

SEQ ID NO: 445 - protein, 35 aa, Artificial
  Completely synthesized peptide construct
IDIFASKNFHLQKNTIGTGGGGDLLKNGERIEKVE

SEQ ID NO: 446 - protein, 35 aa, Artificial; identical to SEQ ID NO: 197
  peptide construct
  MISC_FEATURE (1)..(1): X is I, L or V
  MISC_FEATURE (2)..(2): X is D and E for acidic amino acids
  MISC_FEATURE (3)..(3): X is I, L or V
  MISC_FEATURE (4)..(4): X is F, W or Y for aromatic amino acids
  MISC_FEATURE (5)..(5): X is A or G
  MISC_FEATURE (6)..(6): X is C or S
  MISC_FEATURE (7)..(7): X is K, R or H for basic amino acids
  MISC_FEATURE (8)..(8): X is N or Q for amidated amino acids
  MISC_FEATURE (9)..(9): X is F, W or Y for aromatic amino acids
  MISC_FEATURE (10)..(10): X is K, R or H for basic amino acids
  MISC_FEATURE (11)..(11): X is I, L or V
  MISC_FEATURE (12)..(12): X is N or Q for amidated amino acids
  MISC_FEATURE (13)..(13): X is K, R or H for basic amino acids
  MISC_FEATURE (14)..(14): X is N or Q for amidated amino acids
  MISC_FEATURE (15)..(15): X is T or S
  MISC_FEATURE (16)..(16): X is I, L or V
  MISC_FEATURE (17)..(17): X is A or G
  MISC_FEATURE (18)..(18): X is T or S
  MISC_FEATURE (19)..(19): X is A or G
  MISC_FEATURE (20)..(20): X is A and G
  MISC_FEATURE (21)..(21): X is A and G
  MISC_FEATURE (22)..(22): X is A and G
  MISC_FEATURE (23)..(23): X is D and E for acidic amino acids
  MISC_FEATURE (24)..(24): X is I, L or V
  MISC_FEATURE (25)..(25): X is I, L or V
  MISC_FEATURE (26)..(26): X is K, R or H for basic amino acids
  MISC_FEATURE (27)..(27): X is N or Q for amidated amino acids
  MISC_FEATURE (28)..(28): X is A and G
  MISC_FEATURE (29)..(29): X is D and E for acidic amino acids
  MISC_FEATURE (30)..(30): X is K, R or H for basic amino acids
  MISC_FEATURE (31)..(31): X is I, L or V
  MISC_FEATURE (32)..(32): X is D and E for acidic amino acids
  MISC_FEATURE (33)..(33): X is K, R or H for basic amino acids
  MISC_FEATURE (34)..(34): X is I, L or V
  MISC_FEATURE (35)..(35): X is D and E for acidic amino acids

SEQ ID NO: 447 - protein, 41 aa, Artificial
  Completely synthesized peptide construct
GIGAVLKVLTTGPALISWIKRKRQQGGGDLLKNGERIEKVE

SEQ ID NO: 448 - protein, 41 aa, Artificial; identical to SEQ ID NO: 370
  Completely synthesized peptide construct
  MISC_FEATURE (1)..(1): X is A or G
  MISC_FEATURE (2)..(2): X is I, L or V
  MISC_FEATURE (3)..(3): X is A or G
  MISC_FEATURE (4)..(4): X is A or G
  MISC_FEATURE (5)..(5): X is I, L or V
  MISC_FEATURE (6)..(6): X is I, L or V
  MISC_FEATURE (7)..(7): X is K, R or H for basic amino acids
  MISC_FEATURE (8)..(8): X is I, L or V
  MISC_FEATURE (9)..(9): X is I, L or V
  MISC_FEATURE (10)..(10): X is T or S
  MISC_FEATURE (11)..(11): X is T or S
  MISC_FEATURE (12)..(12): X is A or G
  MISC_FEATURE (13)..(13): X is F or P
  MISC_FEATURE (14)..(14): X is A or G
  MISC_FEATURE (15)..(15): X is I, L or V
  MISC_FEATURE (16)..(16): X is I, L or V
  MISC_FEATURE (17)..(17): X is C or S
  MISC_FEATURE (18)..(18): X is F, W or Y for aromatic amino acids
  MISC_FEATURE (19)..(19): X is I, L or V
  MISC_FEATURE (20)..(20): X is K, R or H for basic amino acids
  MISC_FEATURE (21)..(21): X is K, R or H for basic amino acids
  MISC_FEATURE (22)..(22): X is K, R or H for basic amino acids
  MISC_FEATURE (23)..(23): X is K, R or H for basic amino acids
  MISC_FEATURE (24)..(24): X is N or Q for amidated amino acids
  MISC_FEATURE (25)..(25): X is N or Q for amidated amino acids
  MISC_FEATURE (26)..(26): X is A and G
  MISC_FEATURE (27)..(27): X is A and G
  MISC_FEATURE (28)..(28): X is A and G
  MISC_FEATURE (29)..(29): X is D and E for acidic amino acids
  MISC_FEATURE (30)..(30): X is I, L or V
  MISC_FEATURE (31)..(31): X is I, L or V
  MISC_FEATURE (32)..(32): X is K, R or H for basic amino acids
  MISC_FEATURE (33)..(33): X is N or Q for amidated amino acids
  MISC_FEATURE (34)..(34): X is A and G
  MISC_FEATURE (35)..(35): X is D and E for acidic amino acids
  MISC_FEATURE (36)..(36): X is K, R or H for basic amino acids
  MISC_FEATURE (37)..(37): X is I, L or V
  MISC_FEATURE (38)..(38): X is D and E for acidic amino acids
  MISC_FEATURE (39)..(39): X is K, R or H for basic amino acids
  MISC_FEATURE (40)..(40): X is I, L or V
  MISC_FEATURE (41)..(41): X is D and E for acidic amino acids

SEQ ID NO: 449 - protein, 21 aa, Homo sapiens
VSSVSSQFSDAAQASPSSHSS

SEQ ID NO: 450 - protein, 21 aa, Artificial
  Completely synthesized peptide construct
  MISC_FEATURE (1)..(1): X is I, L or V
  MISC_FEATURE (2)..(2): X is T or S
  MISC_FEATURE (3)..(3): X is T or S
  MISC_FEATURE (4)..(4): X is I, L or V
  MISC_FEATURE (5)..(5): X is T or S
  MISC_FEATURE (6)..(6): X is T or S
  MISC_FEATURE (7)..(7): X is N or Q for amidated amino acids
  MISC_FEATURE (8)..(8): X is F or P
  MISC_FEATURE (9)..(9): X is T or S
  MISC_FEATURE (10)..(10): X is D and E for acidic amino acids
  MISC_FEATURE (11)..(11): X is A and G
  MISC_FEATURE (12)..(12): X is A and g
  MISC_FEATURE (13)..(13): X is T or S
  MISC_FEATURE (14)..(14): X is A and G
  MISC_FEATURE (15)..(15): X is T or S
  MISC_FEATURE (16)..(16): X is F or P
  MISC_FEATURE (17)..(17): X is T or S
  MISC_FEATURE (18)..(18): X is T or S
  MISC_FEATURE (19)..(19): X is K, R or H for basic amino acids
  MISC_FEATURE (20)..(20): X is T or S
  MISC_FEATURE (21)..(21): X is T or S
XXXXXXXXXXXXXXXXXXXXX

SEQ ID NO: 451 - protein, 22 aa, Artificial
  Completely synthesized peptide construct
  MISC_FEATURE (1)..(1): X is acetyl or propionyl group, D glycine or D alanine, cyclohexylalanine at amino terminus
  MISC_FEATURE (2)..(2): X is I, L or V
  MISC_FEATURE (3)..(3): X is T or S
  MISC_FEATURE (4)..(4): X is T or S
  MISC_FEATURE (5)..(5): X is I, L or V
  MISC_FEATURE (6)..(6): X is T or S
  MISC_FEATURE (7)..(7): X is T or S
  MISC_FEATURE (8)..(8): X is N or Q for amidated amino acids
  MISC_FEATURE (9)..(9): X is F or P
  MISC_FEATURE (10)..(10): X is T or S
  MISC_FEATURE (11)..(11): X is D and E for acidic amino acids
  MISC_FEATURE (12)..(12): X is A and G
  MISC_FEATURE (13)..(13): X is A and G
  MISC_FEATURE (14)..(14): X is T or S
  MISC_FEATURE (15)..(15): X is A and G
  MISC_FEATURE (16)..(16): X is T or S
  MISC_FEATURE (17)..(17): X is F or P
  MISC_FEATURE (18)..(18): X is T or S
  MISC_FEATURE (19)..(19): X is T or S
  MISC_FEATURE (20)..(20): X is K, R or H for basic amino acids
  MISC_FEATURE (21)..(21): X is T or S
  MISC_FEATURE (22)..(22): X is T or S
XXXXXXXXXXXXXXXXXXXXXX

SEQ ID NO: 452 - protein, 21 aa, Homo sapiens
MVWESGCTVIVMLTPLVEDGV

SEQ ID NO: 453 - protein, 21 aa, Artificial
  Completely synthesized peptide construct
  MISC_FEATURE (1)..(1): X is M or Nle (Norleucine)
  MISC_FEATURE (2)..(2): X is I, L or V
  MISC_FEATURE (3)..(3): X is F, W or Y for aromatic amino acids
  MISC_FEATURE (4)..(4): X is D and E for acidic amino acids
  MISC_FEATURE (5)..(5): X is T or S
  MISC_FEATURE (6)..(6): X is A and G
  MISC_FEATURE (7)..(7): X is C or S
  MISC_FEATURE (8)..(8): X is T or S
  MISC_FEATURE (9)..(9): X is I, L or V
  MISC_FEATURE (10)..(10): X is I, L or V
  MISC_FEATURE (11)..(11): X is I, L or V
  MISC_FEATURE (12)..(12): X is M or Nle (Norleucine)
  MISC_FEATURE (13)..(13): X is I, L or V
  MISC_FEATURE (14)..(14): X is I, L or V
  MISC_FEATURE (15)..(15): X is F or P
  MISC_FEATURE (16)..(16): X is I, L or V
  MISC_FEATURE (17)..(17): X is I, L or V
  MISC_FEATURE (18)..(18): X is D and E for acidic amino acids
  MISC_FEATURE (19)..(19): X is D and E for acidic amino acids
  MISC_FEATURE (20)..(20): X is A and G
  MISC_FEATURE (21)..(21): X is I, L or V
XXXXXXXXXXXXXXXXXXXXX

SEQ ID NO: 454 - protein, 22 aa, Artificial
  Completely synthesized peptide construct
  MISC_FEATURE (1)..(1): X is acetyl or propionyl group, D glycine or D alanine, cyclohexylalanine at amino terminus
  MISC_FEATURE (2)..(2): X is M or Nle (Norleucine)
  MISC_FEATURE (3)..(3): X is I, L or V
  MISC_FEATURE (4)..(4): X is F, W or Y for aromatic amino acids
  MISC_FEATURE (5)..(5): X is D and E for acidic amino acids
  MISC_FEATURE (6)..(6): X is T or S
  MISC_FEATURE (7)..(7): X is A and G
  MISC_FEATURE (8)..(8): X is C or S
  MISC_FEATURE (9)..(9): X is T or S
  MISC_FEATURE (10)..(10): X is I, L or V
  MISC_FEATURE (11)..(11): X is I, L or V
  MISC_FEATURE (12)..(12): X is I, L or V
  MISC_FEATURE (13)..(13): X is M or Nle (Norleucine)
  MISC_FEATURE (14)..(14): X is I, L or V
  MISC_FEATURE (15)..(15): X is I, L or V
  MISC_FEATURE (16)..(16): X is F or P
  MISC_FEATURE (17)..(17): X is I, L or V
  MISC_FEATURE (18)..(18): X is I, L or V
  MISC_FEATURE (19)..(19): X is I, L or V
  MISC_FEATURE (19)..(19): X is D and E for acidic amino acids
  MISC_FEATURE (20)..(20): X is D and E for acidic amino acids
  MISC_FEATURE (21)..(21): X is A and G
  MISC_FEATURE (22)..(22): X is I, L or V
XXXXXXXXXXXXXXXXXXXXXX

SEQ ID NO: 455 - protein, 20 aa, Artificial
  Completely synthesized peptide construct
  MISC_FEATURE (1)..(1): X is M or Nle (Norleucine)
  MISC_FEATURE (2)..(2): X is I, L or V
  MISC_FEATURE (3)..(3): X is F, W or Y for aromatic amino acids
  MISC_FEATURE (4)..(4): X is D and E for acidic amino acids
  MISC_FEATURE (5)..(5): X is T or S
  MISC_FEATURE (6)..(6): X is A and G
  MISC_FEATURE (7)..(7): X is C or S
  MISC_FEATURE (8)..(8): X is T or S
  MISC_FEATURE (9)..(9): X is Gaba2 for X2X3 or X3X3 or X2X3 or X3X2 or X3X3 or X2X2
  MISC_FEATURE (10)..(10): X is I, L or V
  MISC_FEATURE (11)..(11): X is M or Nle (Norleucine)
  MISC_FEATURE (12)..(12): X is I, L or V
  MISC_FEATURE (13)..(13): X is I, L or V
  MISC_FEATURE (14)..(14): X is F or P
  MISC_FEATURE (15)..(15): X is I, L or V
  MISC_FEATURE (16)..(16): X is I, L or V
  MISC_FEATURE (17)..(17): X is D and E or acidic amino acids
  MISC_FEATURE (18)..(18): X is D and E or acidic amino acids
  MISC_FEATURE (19)..(19): X is A and G
  MISC_FEATURE (20)..(20): X is I, L or V
XXXXXXXXXXXXXXXXXXXX

SEQ ID NO: 456 - protein, 20 aa, Artificial
  Completely synthesized peptide construct
  MISC_FEATURE (1)..(1): X is M or Nle (Norleucine)
  MISC_FEATURE (2)..(2): X is I, L or V
  MISC_FEATURE (3)..(3): X is F, W or Y for aromatic amino acids
  MISC_FEATURE (4)..(4): X is D and E for acidic amino acids
  MISC_FEATURE (5)..(5): X is T or S
  MISC_FEATURE (6)..(6): X is A and G
  MISC_FEATURE (7)..(7): X is C or S
  MISC_FEATURE (8)..(8): X is T or s
  MISC_FEATURE (9)..(9): X is I, L or V
  MISC_FEATURE (10)..(10): X is Gaba2 for X2X3 or X3X2 or X2X3 or X3X2 or X3X3 or X2X2
  MISC_FEATURE (11)..(11): X is M or Nle (Norleucine)
  MISC_FEATURE (12)..(12): X is I, L or V
  MISC_FEATURE (13)..(13): X is I, L or V
  MISC_FEATURE (14)..(14): X is F or P
  MISC_FEATURE (15)..(15): X is I, L or V
  MISC_FEATURE (16)..(16): X is I, L or V
  MISC_FEATURE (17)..(17): X is D and E for acidic amino acids
  MISC_FEATURE (18)..(18): X is D and E for acidic amino acids
  MISC_FEATURE (19)..(19): X is A and G
  MISC_FEATURE (20)..(20): X is I, L or V
XXXXXXXXXXXXXXXXXXXX

SEQ ID NO: 457 - protein, 20 aa, Artificial
  Completely synthesized peptide construct
  MISC_FEATURE (1)..(1): X is M or Nle (Norleucine)
  MISC_FEATURE (2)..(2): X is I, L or V
  MISC_FEATURE (3)..(3): X is F, W or Y for aromatic amino acids
  MISC_FEATURE (4)..(4): X is D and E for acidic amino acids
  MISC_FEATURE (5)..(5): X is T or S
  MISC_FEATURE (6)..(6): X is A and G
  MISC_FEATURE (7)..(7): X is C or S
  MISC_FEATURE (8)..(8): X is T or S
  MISC_FEATURE (9)..(9): X is I, L or V
  MISC_FEATURE (10)..(10): X is I, L or V
  MISC_FEATURE (11)..(11): X is I, L or V
  MISC_FEATURE (12)..(12): X is I, L or V
  MISC_FEATURE (12)..(12): X is M or Nle (Norleucine)
  MISC_FEATURE (13)..(13): X is I, L or V
  MISC_FEATURE (14)..(14): X is I, L or V
  MISC_FEATURE (15)..(15): X is F or P
  MISC_FEATURE (16)..(16): X is I, L or V
  MISC_FEATURE (17)..(17): X is I, L or V
  MISC_FEATURE (18)..(18): X is Gaba2 for X2X3 or X3X2 or X2X3 or X3X2 or X3X3 or X2X2
  MISC_FEATURE (19)..(19): X is A and G
  MISC_FEATURE (20)..(20): X is I, L or V
XXXXXXXXXXXXXXXXXXXX

SEQ ID NO: 458 - protein, 19 aa, Artificial
  Completely synthesized peptide construct
  MISC_FEATURE (1)..(1): X is M or Nle (Norleucine)
  MISC_FEATURE (2)..(2): X is I, L or V
  MISC_FEATURE (3)..(3): X is F, W or Y for aromatic amino acids
  MISC_FEATURE (4)..(4): X is D and E for acidic amino acids
  MISC_FEATURE (5)..(5): X is T or S
  MISC_FEATURE (6)..(6): X is A and G
  MISC_FEATURE (7)..(7): X is C or S
  MISC_FEATURE (8)..(8): X is T or S
  MISC_FEATURE (9)..(9): X is 5-aminopentanoic acid for replacement of 3 or 4 amino acids of X2 and X3
  MISC_FEATURE (10)..(10): X is M or Nle (Norleucine)
  MISC_FEATURE (11)..(11): X is I, L or V
  MISC_FEATURE (12)..(12): X is I, L or V
  MISC_FEATURE (13)..(13): X is F or P
  MISC_FEATURE (14)..(14): X is I, L or V
  MISC_FEATURE (15)..(15): X is I, L or V
  MISC_FEATURE (16)..(16): X is D and E for acidic amino acids
  MISC_FEATURE (17)..(17): X is D and E for acidic amino acids
  MISC_FEATURE (18)..(18): X is A and G
  MISC_FEATURE (19)..(19): X is I, L or V
XXXXXXXXXXXXXXXXXXX

SEQ ID NO: 459 - protein, 18 aa, Artificial
  Completely synthesized peptide construct
  MISC_FEATURE (1)..(1): X is M or Nle (Norleucine)
  MISC_FEATURE (2)..(2): X is I, L or V
  MISC_FEATURE (3)..(3): X is F, W or Y for aromatic amino acids
  MISC_FEATURE (4)..(4): X is D and E for acidic amino acids
  MISC_FEATURE (5)..(5): X is T or S
  MISC_FEATURE (6)..(6): X is A and G
  MISC_FEATURE (7)..(7): X is C or S
  MISC_FEATURE (8)..(8): X is T or S
  MISC_FEATURE (9)..(9): X is I, L or V
  MISC_FEATURE (10)..(10): X is I, L or V
  MISC_FEATURE (11)..(11): X is I, L or V
  MISC_FEATURE (12)..(12): X is M or Nle (Norleucine)
  MISC_FEATURE (13)..(13): X is I, L or V
  MISC_FEATURE (14)..(14): X is I, L or V
  MISC_FEATURE (15)..(15): X is F or P
  MISC_FEATURE (16)..(16): X is 5-aminopentanoic acid for replacement of 3 or 4 amino acids of X2 and X3
  MISC_FEATURE (17)..(17): X is A and G
  MISC_FEATURE (18)..(18): X is I, L or V
XXXXXXXXXXXXXXXXXX

SEQ ID NO: 460 - protein, 16 aa, Artificial
  Completely synthesized peptide construct
  MISC_FEATURE (1)..(1): X is N or Q for amidated amino acids
  MISC_FEATURE (2)..(2): X is I, L or V
  MISC_FEATURE (3)..(3): X is F, W or Y for aromatic amino acids
  MISC_FEATURE (4)..(4): X is D and E for acidic amino acids
  MISC_FEATURE (5)..(5): X is T or S
  MISC_FEATURE (6)..(6): X is A and G
  MISC_FEATURE (7)..(7): X is C or S
  MISC_FEATURE (8)..(8): X is T or S
  MISC_FEATURE (9)..(9): X is 5-aminopentanoic acid for replacement of 3 or 4 amino acids of X2 and X3
  MISC_FEATURE (10)..(10): X is M or Nle (Norleucine)
  MISC_FEATURE (11)..(11): X is I, L or V
  MISC_FEATURE (12)..(12): X is I, L or V
  MISC_FEATURE (13)..(13): X is F or P
  MISC_FEATURE (14)..(14): X is 5-aminopentanoic acid for replacement of 3 or 4 amino acids of X2 and X3
  MISC_FEATURE (15)..(15): X is A and G
  MISC_FEATURE (16)..(16): X is I, L or V
XXXXXXXXXXXXXXXX

SEQ ID NO: 461 - protein, 17 aa, Artificial
  Completely synthesized peptide construct
  MISC_FEATURE (1)..(1): X is M or Nle (Norleucine)
  MISC_FEATURE (2)..(2): X is I, L or V
  MISC_FEATURE (3)..(3): X is F, W or Y for aromatic amino acids
  MISC_FEATURE (4)..(4): X is D and E for acidic amino acids
  MISC_FEATURE (5)..(5): X is T or S
  MISC_FEATURE (6)..(6): X is A and G
  MISC_FEATURE (7)..(7): X is C or S
  MISC_FEATURE (8)..(8): X is T or S
  MISC_FEATURE (9)..(9): X is Gaba2 for X2X3 or X3X2 or X2X3 or X3X2 or X3X3 or X2X2
  MISC_FEATURE (10)..(10): X is I, L or V
  MISC_FEATURE (11)..(11): X is M or Nle (Norleucine)
  MISC_FEATURE (12)..(12): X is Gaba2 for X2X3 or X3X2 or X2X3 or X3X2 or X3X3 or X2X2
  MISC_FEATURE (13)..(13): X is F or P
  MISC_FEATURE (14)..(14): X is Gaba2 for X2X3 or X3X2 or X2X3 or X3X2 or X3X3 or X2X2
  MISC_FEATURE (15)..(15): X is Gaba2 for X2X3 or X3X2 or X2X3 or X3X2 or X3X3 or X2X2
  MISC_FEATURE (16)..(16): X is A and G
  MISC_FEATURE (17)..(17): X is I, L or V
XXXXXXXXXXXXXXXXX

SEQ ID NO: 462 - protein, 21 aa, Artificial
  Completely synthesized peptide construct
  MISC_FEATURE (1)..(1): X is acetyl or propionyl group, D glycine or D alanine, cyclohexylalanine at amino terminus
  MISC_FEATURE (2)..(2): X is M or Nle (Norleucine)
  MISC_FEATURE (3)..(3): X is I, L or V
  MISC_FEATURE (4)..(4): X is F, W or Y for aromatic amino acids
  MISC_FEATURE (5)..(5): X is D and E for acidic amino acids
  MISC_FEATURE (6)..(6): X is T or S
  MISC_FEATURE (7)..(6): X is A and G
  misc_feature (7)..(7): Xaa can be any naturally occurring amino acid
  MISC_FEATURE (8)..(8): X is C or S
  MISC_FEATURE (9)..(9): X is T or S
  MISC_FEATURE (10)..(10): X is Gaba2 for X2X3 or X3X2 or X2X3 or X3X2 or X3X3 or X2X2
  MISC_FEATURE (11)..(11): X is I, L or V
  MISC_FEATURE (12)..(12): X is M or Nle (Norleucine)
  MISC_FEATURE (13)..(13): X is I, L or V
  MISC_FEATURE (14)..(14): X is I, L or V
  MISC_FEATURE (15)..(15): X is F or P
  MISC_FEATURE (16)..(16): X is I, L or V
  MISC_FEATURE (17)..(17): X is I, L or V
  MISC_FEATURE (18)..(18): X is D and E for acidic amino acids
  MISC_FEATURE (19)..(19): X is D and E for acidic amino acids
  MISC_FEATURE (20)..(20): X is A and G
  MISC_FEATURE (21)..(21): X is I, L or V
XXXXXXXXXXXXXXXXXXXXX

SEQ ID NO: 463 - protein, 21 aa, Artificial
  Completely synthesized peptide construct
  MISC_FEATURE (1)..(1): X is acetyl or propionyl group, D glycine or D alanine, cyclohexylalanine at amino terminus
  MISC_FEATURE (2)..(2): X is M or Nle (Norleucine)
  MISC_FEATURE (3)..(3): X is I, L or V
  MISC_FEATURE (4)..(4): X is F, W or Y for aromatic amino acids
  MISC_FEATURE (5)..(5): X is D and E for acidic amino acids
  MISC_FEATURE (6)..(6): X is T or S
  MISC_FEATURE (7)..(7): X is A and G
  MISC_FEATURE (8)..(8): X is C or S
  MISC_FEATURE (9)..(9): X is T or S
  MISC_FEATURE (10)..(10): X is I, L or V
  MISC_FEATURE (11)..(11): X is Gaba2 for X2X3 or X3X2 or X2X3 or X3X2 or X3X3 or X2X2
  MISC_FEATURE (12)..(12): X is M or Nle (Norleucine)
  MISC_FEATURE (13)..(13): X is I, L or V
  MISC_FEATURE (14)..(14): X is I, L or V
  MISC_FEATURE (15)..(15): X is F or P
  MISC_FEATURE (16)..(16): X is I, L or V
  MISC_FEATURE (17)..(17): X is I, L or V
  MISC_FEATURE (18)..(18): X is D and E for acidic amino acids
  MISC_FEATURE (19)..(19): X is D and E for acidic amino acids
  MISC_FEATURE (20)..(20): X is A and G
  MISC_FEATURE (21)..(21): X is I, L or V
XXXXXXXXXXXXXXXXXXXXX

SEQ ID NO: 464 - protein, 21 aa, Artificial
  Completely synthesized peptide construct
  MISC_FEATURE (1)..(1): X is acetyl or propionyl group, D glycine or D alanine, cyclohexylalanine at amino terminus
  MISC_FEATURE (2)..(2): X is M or Nle (Norleucine)
  MISC_FEATURE (3)..(3): X is I, L or V
  MISC_FEATURE (4)..(4): X is F, W or Y for aromatic amino acids
  MISC_FEATURE (5)..(5): X is D and E for acidic amino acids
  MISC_FEATURE (6)..(5): X is T or S
  misc_feature (6)..(6): Xaa can be any naturally occurring amino acid
  MISC_FEATURE (7)..(7): X is A and G
  MISC_FEATURE (8)..(8): X is C or S
  MISC_FEATURE (9)..(9): X is T or S
  MISC_FEATURE (10)..(10): X is I, L or V
  MISC_FEATURE (11)..(11): X is I, L or V
  MISC_FEATURE (12)..(12): X is I, L or V
  MISC_FEATURE (13)..(13): X is M or Nle (Norleucine)
  MISC_FEATURE (14)..(14): X is I, L or V
  MISC_FEATURE (15)..(15): X is I, L or V
  MISC_FEATURE (16)..(16): X is F or P
  MISC_FEATURE (17)..(17): X is I, L or V
  MISC_FEATURE (18)..(18): X is I, L or V
  MISC_FEATURE (19)..(19): X is Gaba2 for X2X3 or X3X2 or X2X3 or X3X2 or X3X3 or X2X2
  MISC_FEATURE (20)..(20): X is A and G
  MISC_FEATURE (21)..(21): X is I, L or V
XXXXXXXXXXXXXXXXXXXXX

SEQ ID NO: 465 - protein, 20 aa, Artificial
  Completely synthesized peptide construct
  MISC_FEATURE (1)..(1): X is acetyl or propionyl group, D glycine or D alanine, cyclohexylalanine at amino terminus
  MISC_FEATURE (2)..(2): X is M or Nle (Norleucine)
  MISC_FEATURE (3)..(3): X is I, L or V
  MISC_FEATURE (4)..(4): X is F, W or Y for aromatic amino acids
  MISC_FEATURE (5)..(5): X is D and E for acidic amino acids
  MISC_FEATURE (6)..(6): X is T or S
  MISC_FEATURE (7)..(7): X is A and G
  MISC_FEATURE (8)..(8): X is C or S
  MISC_FEATURE (9)..(9): X isT or S
  MISC_FEATURE (10)..(10): X is T or S
  MISC_FEATURE (10)..(10): X is 5-aminopentanoic acid for replacement of 3 or 4 amino acids of X2 and X3
  MISC_FEATURE (11)..(11): X is M or Nle (Norleucine)
  MISC_FEATURE (12)..(12): X is I, L or V
  MISC_FEATURE (13)..(13): X is I, L or V
  MISC_FEATURE (14)..(14): X is F or P
  MISC_FEATURE (15)..(15): X is I, L or V
  MISC_FEATURE (16)..(16): X is I, L or V
  MISC_FEATURE (17)..(17): X is D and E for acidic amino acids
  MISC_FEATURE (18)..(18): X is D and E for acidic amino acids
  MISC_FEATURE (19)..(19): X is A and G
  MISC_FEATURE (20)..(20): X is I, L or V
XXXXXXXXXXXXXXXXXXXX

SEQ ID NO: 466 - protein, 19 aa, Artificial
  Completely synthesized peptide construct
  MISC_FEATURE (1)..(1): X is acetyl or propionyl group, D glycine or D alanine, cyclohexylalanine at amino terminus
  MISC_FEATURE (2)..(2): X is M or Nle (Norleucine)
  MISC_FEATURE (3)..(3): X is I, L or V
  MISC_FEATURE (4)..(4): X is F, W or Y for aromatic amino acids
  MISC_FEATURE (5)..(5): X is D and E for acidic amino acids
  MISC_FEATURE (6)..(6): X is T or S
  MISC_FEATURE (7)..(7): X is A and G
  MISC_FEATURE (8)..(8): X is C or S
  MISC_FEATURE (9)..(9): X is T or S
  MISC_FEATURE (10)..(10): X is I, L or V
  MISC_FEATURE (11)..(11): X is I, L or V
  MISC_FEATURE (12)..(12): X is I, L or V
  MISC_FEATURE (13)..(13): X is M or Nle (Norleucine)
  MISC_FEATURE (14)..(14): X is I, L or V
  MISC_FEATURE (15)..(15): X is I, L or V
  MISC_FEATURE (16)..(16): X is F or P
  MISC_FEATURE (17)..(17): X is 5-aminopentanoic acid for replacement of 3 or 4 amino acids of X2 and X3
  MISC_FEATURE (18)..(18): X is A and G
  MISC_FEATURE (19)..(19): X is I, L or V
XXXXXXXXXXXXXXXXXXX

SEQ ID NO: 467 - protein, 17 aa, Artificial
  Completely synthesized peptide construct
  MISC_FEATURE (1)..(1): X is acetyl or propionyl group, D glycine or D alanine, cyclohexylalanine at amino terminus
  MISC_FEATURE (2)..(2): X is M or Nle (Norleucine)
  MISC_FEATURE (3)..(3): X is I, L or V
  MISC_FEATURE (4)..(4): X is F, W or Y for aromatic amino acids
  MISC_FEATURE (5)..(5): X is D and E for acidic amino acids
  MISC_FEATURE (6)..(6): X is T or S
  MISC_FEATURE (7)..(6): X is A and G
  misc_feature (7)..(7): Xaa can be any naturally occurring amino acid
  MISC_FEATURE (8)..(8): X is C or S
  MISC_FEATURE (9)..(9): X is T or S
  MISC_FEATURE (10)..(10): X is 5-aminopentanoic acid for replacement of 3 or 4 amino acids of X2 and X3
  MISC_FEATURE (11)..(11): X is M or Nle (Norleucine)
  MISC_FEATURE (12)..(12): X is I, L or V
  MISC_FEATURE (13)..(13): X is I, L or V
  MISC_FEATURE (14)..(14): X is F or P
  MISC_FEATURE (15)..(15): X is 5-aminopentanoic acid for replacement of 3 or 4 amino acids of X2 or X3
  MISC_FEATURE (16)..(16): X is A and G
  MISC_FEATURE (17)..(17): X is I, L or V
XXXXXXXXXXXXXXXXX

SEQ ID NO: 468 - protein, 18 aa, Artificial
  Completely synthesized peptide construct
  MISC_FEATURE (1)..(1): X is acetyl or propionyl group, D glycine or D alaninie, cyclohexylalanine at amino terminus
  MISC_FEATURE (2)..(2): X is M or Nle (Norleucine)
  MISC_FEATURE (3)..(3): X is I, L or V
  MISC_FEATURE (4)..(4): X is F, W or Y for aromatic amino acids
  MISC_FEATURE (5)..(5): X is D and E for acidic amino acids
  MISC_FEATURE (6)..(6): X is T or S
  MISC_FEATURE (7)..(7): X is A and G
  MISC_FEATURE (8)..(8): X is C or S
  MISC_FEATURE (9)..(9): X is T or S
  MISC_FEATURE (10)..(10): X is Gaba2 for X2X3 or X3X2 or X2X3 or X3X2 or X3X3 or X2X2
  MISC_FEATURE (11)..(11): X is I, L or V
  MISC_FEATURE (12)..(12): X is M or Nle (Norleucine)
  MISC_FEATURE (13)..(13): X is A and G
  MISC_FEATURE (14)..(14): X is F or P
  MISC_FEATURE (15)..(15): X is Gaba2 for X2X3 or X3X2 or X2X3 or X3X2 or X3X3 or X2X2
  MISC_FEATURE (16)..(16): X is Gaba2 for X2X3 or X3X2 or X2X3 or X3X2 or X3X3 or X2X2
  MISC_FEATURE (17)..(17): X is A and G
  MISC_FEATURE (18)..(18): X is I, L or V
XXXXXXXXXXXXXXXXXX

SEQ ID NO: 469 - protein, 19 aa, Homo sapiens
FYLKNVQTQETRTLTQFHF

SEQ ID NO: 470 - protein, 19 aa, Artificial
  Completely synthesized peptide construct
  MISC_FEATURE (1)..(1): X is F or P
  MISC_FEATURE (2)..(2): X is F, W or Y for aromatic amino acids
  MISC_FEATURE (3)..(3): X is I, L or V
  MISC_FEATURE (4)..(4): X is K, R or H for basic amino acids
  MISC_FEATURE (5)..(5): X is N or Q for amidated amino acids
  MISC_FEATURE (6)..(6): X is I, L or V
  MISC_FEATURE (7)..(7): X is N or Q for amidated amino acids
  MISC_FEATURE (8)..(8): X is T or S
  MISC_FEATURE (9)..(9): X is N or Q for amidated amino acids
  MISC_FEATURE (10)..(10): X is for D and E for acidic amino acids
  MISC_FEATURE (11)..(11): X is I, L or V
  MISC_FEATURE (12)..(12): X is K, R or H for basic amino acids
  MISC_FEATURE (13)..(13): X is T or S
  MISC_FEATURE (14)..(14): X is I, L or V
  MISC_FEATURE (15)..(15): X is T or S
  MISC_FEATURE (16)..(16): X is N or Q for amidated amino acids
  MISC_FEATURE (17)..(17): X is F or P
  MISC_FEATURE (18)..(18): X is K, R or H for basic amino acids
  MISC_FEATURE (19)..(19): X is F, W or Y for aromatic amino acids
XXXXXXXXXXXXXXXXXXX

SEQ ID NO: 471 - protein, 20 aa, Artificial
  Completely synthesized peptide construct
  MISC_FEATURE (1)..(1): X is acetyl or propionyl group, D glycine or D alanine, cyclohexylalanine at amino terminus
  MISC_FEATURE (2)..(2): X is F or P
  MISC_FEATURE (3)..(3): X is F, W or Y for aromatic amino acids
  MISC_FEATURE (4)..(4): X is I, L or V
  MISC_FEATURE (5)..(5): X is K, R or H for basic amino acids
  MISC_FEATURE (6)..(6): X is N or Q for amidated amino acids
  MISC_FEATURE (7)..(7): X is I, L or V
  MISC_FEATURE (8)..(8): X is N or Q for amidated amino acids
  MISC_FEATURE (9)..(9): X is T or S
  MISC_FEATURE (10)..(10): X is N or Q for amidated amino acids
  MISC_FEATURE (11)..(11): X is D and E for acidic amino acids
  MISC_FEATURE (12)..(12): X is I, L or V
  MISC_FEATURE (13)..(13): X is K, R or H for basic amino acids
  MISC_FEATURE (14)..(14): X is T or S
  MISC_FEATURE (15)..(15): X is I, L or V
  MISC_FEATURE (16)..(16): X is T or S
  MISC_FEATURE (17)..(17): X is N or Q for amidated amino acids
  MISC_FEATURE (18)..(18): X is F or P
  MISC_FEATURE (19)..(19): X is K, R or H for basic amino acids
  MISC_FEATURE (20)..(20): X is F, W or Y for aromatic amino acids
XXXXXXXXXXXXXXXXXXXX

SEQ ID NO: 472 - protein, 18 aa, Artificial
  Completely synthesized peptide construct
  MISC_FEATURE (1)..(1): X is F or P
  MISC_FEATURE (2)..(2): X is F, W or Y for aromatic amino acids
  MISC_FEATURE (3)..(3): X is I, L or V
  MISC_FEATURE (4)..(4): X is K, R or H for basic amino acids
  MISC_FEATURE (5)..(5): X is N or Q for amidated amino acids
  MISC_FEATURE (6)..(6): X is I, L or V
  MISC_FEATURE (7)..(7): X is N or Q for amidated amino acids
  MISC_FEATURE (8)..(8): X is T or S
  MISC_FEATURE (9)..(9): X is N or Q for amidated amino acids
  MISC_FEATURE (10)..(10)
  MISC_FEATURE (10)..(10): X is Gaba2 for X2X3 or X3X2 or X2X3 or X3X2 or X3X3 or X2X2
  MISC_FEATURE (11)..(11): X is K, R or H for basic amino acids
  MISC_FEATURE (12)..(12): X is T or S
  MISC_FEATURE (13)..(13): X is T or S
  MISC_FEATURE (14)..(14): X is T or S
  MISC_FEATURE (15)..(15): X is N or Q for amidated amino acids
  MISC_FEATURE (16)..(16): X is F or P
  MISC_FEATURE (17)..(17): X is K, R or H for basic amino acids
  MISC_FEATURE (18)..(18): X is F, W or Y for aromatic amino acids
XXXXXXXXXXXXXXXXXX

SEQ ID NO: 473 - protein, 19 aa, Artificial
  Completely synthesized peptide construct
  MISC_FEATURE (1)..(1): X is acetyl or propionyl group, D glycine or D alanine, cyclohexylalanine at amino terminus
  MISC_FEATURE (2)..(2): X is F or P
  MISC_FEATURE (3)..(3): X is F, W or Y for aromatic amino acids
  MISC_FEATURE (4)..(4): X is I, L or V
  MISC_FEATURE (5)..(5): X is K, R or H for basic amino acids
  MISC_FEATURE (6)..(6): X is N or Q for amidated amino acids
  MISC_FEATURE (7)..(7): X is I, L or V
  MISC_FEATURE (8)..(8): X is N or Q for amidated amino acids
  MISC_FEATURE (9)..(9): X is T or S
  MISC_FEATURE (10)..(10): X is N or Q for amidated amino acids
  MISC_FEATURE (11)..(11): X is GabaX for X2X3 or X3X2 or X2X3 or X3X2 or X3X3 or X2X2
  MISC_FEATURE (12)..(12): X is K, R or H for basic amino acids
  MISC_FEATURE (13)..(13): X is T or S
  MISC_FEATURE (14)..(14): X is I, L or V
  MISC_FEATURE (15)..(15): X is T or S
  MISC_FEATURE (16)..(16): X is N or Q for amidated amino acids
  MISC_FEATURE (17)..(17): X is F or P
  MISC_FEATURE (18)..(18): X is K, R or H for basic amino acids
  MISC_FEATURE (19)..(19): X is F, W or Y for aromatic amino acids
XXXXXXXXXXXXXXXXXXX

SEQ ID NO: 474 - protein, 20 aa, Homo sapiens
DGEAGKPGKAGERGPPGPQG

SEQ ID NO: 475 - protein, 20 aa, Artificial
  Completely synthesized peptide construct
  MISC_FEATURE (1)..(1): X is D and E for acidic amino acids
  MISC_FEATURE (2)..(2): X is A and G
  MISC_FEATURE (3)..(3): X is D and E for acidic amino acids
  MISC_FEATURE (4)..(4): X is A and G
  MISC_FEATURE (5)..(5): X is A and G
  MISC_FEATURE (6)..(6): X is K, R or H for basic amino acids
  MISC_FEATURE (7)..(7): X is F or P
  MISC_FEATURE (8)..(8): X is A and G
  MISC_FEATURE (9)..(9): X is K, R or H for basic amino acids
  MISC_FEATURE (10)..(10): X is A and G
  MISC_FEATURE (11)..(11): X is A and G
  MISC_FEATURE (12)..(12): X is D and E for acidic amino acids
  MISC_FEATURE (13)..(13): X is K, R or H for basic amino acids
  MISC_FEATURE (14)..(14): X is A and G
  MISC_FEATURE (15)..(15): X is F or P
  MISC_FEATURE (16)..(16): X is F or P
  MISC_FEATURE (17)..(17): X is A and G
  MISC_FEATURE (18)..(18): X is F or P
  MISC_FEATURE (19)..(19): X is N or Q for amidated amino acids
  MISC_FEATURE (20)..(20): X is A and G
XXXXXXXXXXXXXXXXXXXX

SEQ ID NO: 476 - protein, 21 aa, Artificial
  Completely synthesized peptide construct
  MISC_FEATURE (1)..(1): X is acetyl or propionyl group, D glycine or D alanine, cyclohexylalanine at amino terminus
  MISC_FEATURE (2)..(2): X is D and E for acidic amino acids
  MISC_FEATURE (3)..(3): X is A and G
  MISC_FEATURE (4)..(4): X is D and E for acidic amino acids
  MISC_FEATURE (5)..(5): X is A and G
  MISC_FEATURE (6)..(6): X is A and G
  MISC_FEATURE (7)..(7): X is K, R or H for basic amino acids
  MISC_FEATURE (8)..(8): X is A and G
  MISC_FEATURE (9)..(9): X is K, R or H for basic amino acids
  MISC_FEATURE (10)..(10): X is K, R or H for basic amino acids
  MISC_FEATURE (11)..(11): X is A and G
  MISC_FEATURE (12)..(12): X is A and G
  MISC_FEATURE (13)..(13): X is D and E for acidic amino acids
  MISC_FEATURE (14)..(14): X is K, R or H for basic amino acids
  MISC_FEATURE (15)..(15): X is A and G
  MISC_FEATURE (16)..(16): X is F or P
  MISC_FEATURE (17)..(17): X is F or P
  MISC_FEATURE (18)..(18): X is A and G
  MISC_FEATURE (19)..(19): X is F or P
  MISC_FEATURE (20)..(20): X is N or Q for amidated amino acids
  MISC_FEATURE (21)..(21): X is A and G
XXXXXXXXXXXXXXXXXXXXX

SEQ ID NO: 477 - protein, 20 aa, Homo sapiens
GLDGAKGEAGAPGVKGESGS

SEQ ID NO: 478 - protein, 21 aa, Artificial
  Completely synthesized peptide construct
  MISC_FEATURE (1)..(1): X is A and G
  MISC_FEATURE (2)..(2): X is I, L or V
  MISC_FEATURE (3)..(3): X is D and E for acidic amino acids
  MISC_FEATURE (4)..(4): X is A and G
  MISC_FEATURE (5)..(5): X is A and G
  MISC_FEATURE (6)..(6): X is K, R or H for basic amino acids
  MISC_FEATURE (7)..(7): X is A and G
  MISC_FEATURE (8)..(8): X is D and E for acidic amino acids
  MISC_FEATURE (9)..(9): X is A and G
  MISC_FEATURE (10)..(10): X is A and G
  MISC_FEATURE (11)..(11): X is A and G
  MISC_FEATURE (12)..(12): X is F or P
  MISC_FEATURE (13)..(13): X is A and G
  MISC_FEATURE (14)..(14): X is I, L or V
  MISC_FEATURE (15)..(15): X is K, R or H for basic amino acids
  MISC_FEATURE (16)..(16): X is A and G
  MISC_FEATURE (17)..(17): X is D and E for acidic amino acids
  MISC_FEATURE (18)..(18): X is T or S
  MISC_FEATURE (19)..(19): X is A and G
  MISC_FEATURE (20)..(20): X is A and G
  MISC_FEATURE (21)..(21): X is T or S
XXXXXXXXXXXXXXXXXXXXX

SEQ ID NO: 479 - protein, 21 aa, Artificial
  Completely synthesized peptide construct
  MISC_FEATURE (1)..(1): X is acetyl or propionyl group, D glycine or D alanine, cyclohexylalanine at amino terminus
  MISC_FEATURE (2)..(2): X is A and G
  MISC_FEATURE (3)..(3): X is I, L or V
  MISC_FEATURE (4)..(4): X is D and E for acidic amino acids
  MISC_FEATURE (5)..(5): X is A and G
  MISC_FEATURE (6)..(6): X is A and G
  MISC_FEATURE (7)..(7): X is K, R or H for basic amino acids
  MISC_FEATURE (8)..(8): X is A and G
  MISC_FEATURE (9)..(9): X is D and E for acidic amino acids
  MISC_FEATURE (10)..(10): X is A and G
  MISC_FEATURE (11)..(11): X is A and G
  MISC_FEATURE (12)..(12): X is A and G
  MISC_FEATURE (13)..(13): X is F or P
  MISC_FEATURE (14)..(14): X is A and G
  MISC_FEATURE (15)..(15): X is I, L or V
  MISC_FEATURE (16)..(16): X is K, R or H for basic amino acids
  MISC_FEATURE (17)..(17): X is A and G
  MISC_FEATURE (18)..(18): X is D and E for acidic amino acids
  MISC_FEATURE (19)..(19): X is T or S
  MISC_FEATURE (20)..(20): X is A and G
  MISC_FEATURE (21)..(21): X is T or S
XXXXXXXXXXXXXXXXXXXXX

SEQ ID NO: 480 - protein, 19 aa, Artificial
  Completely synthesized peptide construct
  MISC_FEATURE (1)..(1): X is A and G
  MISC_FEATURE (2)..(2): X is GabaX for X2X3 or X3X2 or X2X3 or X3X2 or X3X3 or X2X2
  MISC_FEATURE (3)..(3): X is A and G
  MISC_FEATURE (4)..(4): X is A and G
  MISC_FEATURE (5)..(5): X is K, R or H for basic amino acids
  MISC_FEATURE (6)..(6): X is A and G
  MISC_FEATURE (7)..(7): X is D and E for acidic amino acids
  MISC_FEATURE (8)..(8): X is A and G
  MISC_FEATURE (9)..(9): X is A and G
  MISC_FEATURE (10)..(10): X is A and G
  MISC_FEATURE (11)..(11): X is F or P
  MISC_FEATURE (12)..(12): X is A and G
  MISC_FEATURE (13)..(13): X is I, L or V
  MISC_FEATURE (14)..(14): X is K, R or H for basic amino acids
  MISC_FEATURE (15)..(15): X is A and G
  MISC_FEATURE (16)..(16): X is D and E for acidic amino acids
  MISC_FEATURE (17)..(17): X is T or S
  MISC_FEATURE (18)..(18): X is A and G
  MISC_FEATURE (19)..(19): X is T or S
XXXXXXXXXXXXXXXXXXX

SEQ ID NO: 481 - protein, 20 aa, Artificial
  Completely synthesized peptide construct
  MISC_FEATURE (1)..(1): X is acetyl or propionyl group, D glycine or D alanine, cyclohexylalanine at amino terminus
  MISC_FEATURE (2)..(2): X is A and G
  MISC_FEATURE (3)..(3): X is GabaX for X2X3 or X3X2 or X2X3 or X3X2 or X3X3 or X2X2
  MISC_FEATURE (4)..(4): X is A and G
  MISC_FEATURE (5)..(5): X is A and G
  MISC_FEATURE (6)..(6): X is K, R or H for basic amino acids
  MISC_FEATURE (7)..(7): X is A and G
  MISC_FEATURE (8)..(8): X is D and E for acidic amino acids
  MISC_FEATURE (9)..(9): X is A and G
  MISC_FEATURE (10)..(10): X is A and G
  MISC_FEATURE (11)..(11): X is A and G
  MISC_FEATURE (12)..(12): X is F or P
  MISC_FEATURE (13)..(13): X is A and G
  MISC_FEATURE (14)..(14): X is I, L or V
  MISC_FEATURE (15)..(15): X is K, R or H for basic amino acids
  MISC_FEATURE (16)..(16): X is A and G
  MISC_FEATURE (17)..(17): X is D and E for acidic amino acids
  MISC_FEATURE (18)..(18): X is T or S
  MISC_FEATURE (19)..(19): X is A and G
  MISC_FEATURE (20)..(20): X is T or S
XXXXXXXXXXXXXXXXXXXX

SEQ ID NO: 482 - protein, 20 aa, Homo sapiens
ERGAAGIAGDKGDRGDVGEK

SEQ ID NO: 483 - protein, 20 aa, Artificial
  Completely synthesized peptide construct
  MISC_FEATURE (1)..(1): X is D and E for acidic amino acids
  MISC_FEATURE (2)..(2): X is K, R or H for basic amino acids
  MISC_FEATURE (3)..(3): X is A and G
  MISC_FEATURE (4)..(4): X is A and G
  MISC_FEATURE (5)..(5): X is A and G
  MISC_FEATURE (6)..(6): X is A and G
  MISC_FEATURE (7)..(7): X is I, L or V
  MISC_FEATURE (8)..(8): X is A and G
  MISC_FEATURE (9)..(9): X is A and G
  MISC_FEATURE (10)..(10): X is D and E for acidic amino acids
  MISC_FEATURE (11)..(11): X is K, R or H for basic amino acids
  MISC_FEATURE (12)..(12): X is A and G
  MISC_FEATURE (13)..(13): X is D and E for acidic amino acids
  MISC_FEATURE (14)..(14): A is K, R or H for basic amino acids
  MISC_FEATURE (15)..(15): X is A and G
  MISC_FEATURE (16)..(16): X is D and E for acidic amino acids
  MISC_FEATURE (17)..(17): X is I, L or V
  MISC_FEATURE (18)..(18): X is A and G
  MISC_FEATURE (19)..(19): X is D and E for acidic amino acids
  MISC_FEATURE (20)..(20): X is K, R or H for basic amino acids
XXXXXXXXXXXXXXXXXXXX

SEQ ID NO: 484 - protein, 21 aa, Artificial
  Completely synthesized peptide construct
  MISC_FEATURE (1)..(1): X is acetyl or propionyl group, D glycine or D alanine, cyclohexylalanine at amino terminus
  MISC_FEATURE (2)..(2): X is D and E for acidic amino acids
  MISC_FEATURE (3)..(3): X is K, R or H for basic amino acids
  MISC_FEATURE (4)..(4): X is A and G
  MISC_FEATURE (5)..(5): X is A and G
  MISC_FEATURE (6)..(6): X is A and G
  MISC_FEATURE (7)..(7): X is A and G
  MISC_FEATURE (8)..(8): X is I, L or V
  MISC_FEATURE (9)..(9): X is A and G
  MISC_FEATURE (10)..(10): X is A and G
  MISC_FEATURE (11)..(11): X is D and E for acidic amino acids
  MISC_FEATURE (12)..(12): X is K, R or H for basic amino acids
  MISC_FEATURE (13)..(13): X is D and E for acidic amino acids
  MISC_FEATURE (14)..(14): X is K, R or H for basic amino acids
  MISC_FEATURE (15)..(15): X is A and G
  MISC_FEATURE (16)..(16): X is D and E for acidic amino acids
  MISC_FEATURE (17)..(17): X is I, L or V
  MISC_FEATURE (18)..(18): X is A and G
  MISC_FEATURE (19)..(19): X is A and G
  MISC_FEATURE (20)..(20): X is D and E for acidic amino acids
  MISC_FEATURE (21)..(21): X is K, R or H for basic amino acids
XXXXXXXXXXXXXXXXXXXXX

SEQ ID NO: 485 - protein, 19 aa, Artificial
  Completely synthesized peptide construct
  MISC_FEATURE (1)..(1): X is D and E for acidic amino acids
  MISC_FEATURE (2)..(2): X is K, R or H for basic amino acids
  MISC_FEATURE (3)..(3): X is A and G
  MISC_FEATURE (4)..(4): X is A and G
  MISC_FEATURE (5)..(5): X is A and G
  MISC_FEATURE (6)..(6): X is A and G
  MISC_FEATURE (7)..(7): X is I, L or V
  MISC_FEATURE (8)..(8): X is A and G
  MISC_FEATURE (9)..(9): X is A and G
  MISC_FEATURE (10)..(10): X is D and E for acidic amino acids
  MISC_FEATURE (11)..(11): X is K, R or H for basic amino acids
  MISC_FEATURE (12)..(12): X is A and G
  MISC_FEATURE (13)..(13): X is D and E for acidic amino acids
  MISC_FEATURE (14)..(14): X is K. R or H for basic amino acids
  MISC_FEATURE (15)..(15): X is A and G
  MISC_FEATURE (16)..(16): X is GabaX for X2X3 or X3X2 or X2X3 or X3X2 or X3X3 or X2X2
  MISC_FEATURE (17)..(17): X is A and G
  MISC_FEATURE (18)..(18): X is D and E for acidic amino acids
  MISC_FEATURE (19)..(19): X is K, R or H for basic amino acids
XXXXXXXXXXXXXXXXXXX

SEQ ID NO: 486 - protein, 20 aa, Artificial
  Completely synthesized peptide construct
  MISC_FEATURE (1)..(1): X is acetyl or propionyl group, D glycine or D alanine, cyclohexylalanine at amino terminus
  MISC_FEATURE (2)..(2): X is D and E for acidic amino acids
  MISC_FEATURE (3)..(3): X is K, R or H for basic amino acids
  MISC_FEATURE (4)..(4): X is A and G
  MISC_FEATURE (5)..(5): X is A and G
  MISC_FEATURE (6)..(6): X is A and G
  MISC_FEATURE (7)..(7): X is A and G
  MISC_FEATURE (8)..(8): X is I, L or V
  MISC_FEATURE (9)..(9): X is A and G
  MISC_FEATURE (10)..(10): X is A and G
  MISC_FEATURE (11)..(11): X is D and E for acidic amino acids
  MISC_FEATURE (12)..(12): X is K, R or H for basic amino acids
  MISC_FEATURE (13)..(13): X is A and G
  MISC_FEATURE (14)..(14): X is D and E for acidic amino acids
  MISC_FEATURE (15)..(15): X is K, R or H for basic amino acids
  MISC_FEATURE (16)..(16): X is A and G
  MISC_FEATURE (17)..(17): X is GabaX for X2X3 or X3X2 or X2X3 or X3X2 or X3X3 or X2X2
  MISC_FEATURE (18)..(18): X is A and G
  MISC_FEATURE (19)..(19): X is D and E for acidic amino acids
  MISC_FEATURE (20)..(20): X is K, R or H for basic amino acids
XXXXXXXXXXXXXXXXXXXX

SEQ ID NO: 487 - protein, 17 aa, Homo sapiens
DGRGDSLAYGLRSKSKK

SEQ ID NO: 488 - protein, 7 aa, Artificial
  Completely synthesized peptide construct
  MISC_FEATURE (1)..(1): X is T or S
  MISC_FEATURE (2)..(2): X is I, L or V
  MISC_FEATURE (3)..(3): X is A and G
  MISC_FEATURE (4)..(4): X is F, W or Y for aromatic amino acids
  MISC_FEATURE (5)..(5): X is A and G
  MISC_FEATURE (6)..(6): X is I, L or V
  MISC_FEATURE (7)..(7): X is K, R or H for basic amino acids
XXXXXXX

SEQ ID NO: 489 - protein, 8 aa, Artificial
  Completely synthesized peptide construct
  MISC_FEATURE (1)..(1): X is acetyl or propionyl group, D glycine or D alanine, cyclohexylalanine at amino terminus
  MISC_FEATURE (2)..(2): X is T or S
  MISC_FEATURE (3)..(3): X is I, L or V
  MISC_FEATURE (4)..(4): X is A and G
  MISC_FEATURE (5)..(5): X is F, W or Y for aromatic amino acids
  MISC_FEATURE (6)..(6): X is A and G
  MISC_FEATURE (7)..(7): X is I, L or V
  MISC_FEATURE (8)..(8): X is K, R or H for basic amino acids
XXXXXXXX

SEQ ID NO: 490 - protein, 15 aa, Homo sapiens
QKRAAYKQYGHAAFE

SEQ ID NO: 491 - protein, 15 aa, Artificial
  Completely synthesized peptide construct
  MISC_FEATURE (1)..(1): X is N or Q for amidated amino acids
  MISC_FEATURE (2)..(2): X is K, R or H for basic amino acids
  MISC_FEATURE (3)..(3): X is K, R or H for basic amino acids
  MISC_FEATURE (4)..(4): X is A and G
  MISC_FEATURE (5)..(5): X is A and G
  MISC_FEATURE (6)..(6): X is F, W or Y for aromatic amino acids
  MISC_FEATURE (7)..(7): X is K, R or H for basic amino acids
  MISC_FEATURE (8)..(8): X is N or Q for amidated amino acids
  MISC_FEATURE (9)..(9): X is F, W or Y for aromatic amino acids
  MISC_FEATURE (10)..(10): X is A and G
  MISC_FEATURE (11)..(11): X is K, R or H for basic amino acids
  MISC_FEATURE (12)..(12): X is A and G
  MISC_FEATURE (13)..(13): X is A and G
  MISC_FEATURE (14)..(14): X is F or P
  MISC_FEATURE (15)..(15): X is D and E for acidic amino acids
XXXXXXXXXXXXXXX

SEQ ID NO: 492 - protein, 16 aa, Artificial
  Completely synthesized peptide construct
  MISC_FEATURE (1)..(1): X is aceytl or propionyl group, D glycine or D alanine, cyclohexylalanine at amino terminus
  MISC_FEATURE (2)..(2): X is N or Q for amidated amino acids
  MISC_FEATURE (3)..(3): X is K, R or H for basic amino acids
  MISC_FEATURE (4)..(4): X is K, R or H for basic amino acids
  MISC_FEATURE (5)..(5): X A and G
  MISC_FEATURE (6)..(6): X A and G
  MISC_FEATURE (7)..(7): X is F, W or Y for aromatic amino acids
  MISC_FEATURE (8)..(8): X is K, R or H for basic amino acids
  MISC_FEATURE (9)..(9): X is N or Q for amidated amino acids
  MISC_FEATURE (10)..(10): X is F, W or Y for aromatic amino acids
  MISC_FEATURE (11)..(11): X is A and G
  MISC_FEATURE (12)..(12): X is K, R or H for basic amino acids
  MISC_FEATURE (13)..(13): X is A and G
  MISC_FEATURE (14)..(14): X is A and G
  MISC_FEATURE (15)..(15): X is F or P
  MISC_FEATURE (16)..(16): X is D and E for acidic amino acids
XXXXXXXXXXXXXXXX

SEQ ID NO: 493 - protein, 14 aa, Homo sapiens
ERAAYDQYGHAAFE

SEQ ID NO: 494 - protein, 14 aa, Artificial
  Completely synthesized peptide construct
  MISC_FEATURE (1)..(1): X is D and E for acidic amino acids
  MISC_FEATURE (2)..(2): X is K, R or H for basic amino acids
  MISC_FEATURE (3)..(3): X is A and G
  MISC_FEATURE (4)..(4): X is A and G
  MISC_FEATURE (5)..(5): X is F, W or Y for aromatic amino acids
  MISC_FEATURE (6)..(6): X is D and E for acidic amino acids
  MISC_FEATURE (7)..(7): X is N or Q for amidated amino acids
  MISC_FEATURE (8)..(8): X is F, W or Y for aromatic amino acids
  MISC_FEATURE (9)..(9): X is A and G
  MISC_FEATURE (10)..(10): X is K, R or H for basic amino acids
  MISC_FEATURE (11)..(11): X is A and G
  MISC_FEATURE (12)..(12): X is A and G
  MISC_FEATURE (13)..(13): X is F or P
  MISC_FEATURE (14)..(14): X is D and E for acidic amino acids
XXXXXXXXXXXXXX

SEQ ID NO: 495 - protein, 15 aa, Artificial
  Completely synthesized peptide construct
  MISC_FEATURE (1)..(1): X is acetyl or propionyl group, D glycine or D alanine, cyclohexylalanine at amino terminus
  MISC_FEATURE (2)..(2): X is D and E for acidic amino acids
  MISC_FEATURE (3)..(3): X is K, R or H for basic amino acids
  MISC_FEATURE (4)..(4): X is A and G
  MISC_FEATURE (5)..(5): X is A and G
  MISC_FEATURE (6)..(6): X is F, W or Y for aromatic amino acids
  MISC_FEATURE (7)..(7): X is D and E for acidic amino acids
  MISC_FEATURE (8)..(8): X is N or Q for amidated amino acids
  MISC_FEATURE (9)..(9): X is F, W or Y for aromatic amino acids
  MISC_FEATURE (10)..(10): X is A and G
  MISC_FEATURE (11)..(11): X is K, R or H for basic amino acids
  MISC_FEATURE (12)..(12): X is A and G
  MISC_FEATURE (13)..(13): X is A and G
  MISC_FEATURE (14)..(14): X is F or P
  MISC_FEATURE (15)..(15): X is A and G
XXXXXXXXXXXXXXX

SEQ ID NO: 496 - protein, 17 aa, Homo sapiens
SVKLSIAVKNKAEFHQS

SEQ ID NO: 497 - protein, 17 aa, Artificial
  Completely synthesized peptide construct
  MISC_FEATURE (1)..(1): X is T or S
  MISC_FEATURE (2)..(2): X is I, L or V
  MISC_FEATURE (3)..(3): X is K, R or H for basic amino acids
  MISC_FEATURE (4)..(4): X is I, L or V
  MISC_FEATURE (5)..(5): X is T or S
  MISC_FEATURE (6)..(6): X is I, L or V
  MISC_FEATURE (7)..(7): X is A and G
  MISC_FEATURE (8)..(8): X is I, L or V
  MISC_FEATURE (9)..(9): X is K, R or H for basic amino acids
  MISC_FEATURE (10)..(10): X is N or Q for amidated amino acids
  MISC_FEATURE (11)..(11): X is K, R or H for basic amino acids
  MISC_FEATURE (12)..(12): X is A and G
  MISC_FEATURE (13)..(13): X is D and E for acidic amino acids
  MISC_FEATURE (14)..(14): X is F or P
  MISC_FEATURE (15)..(15): X is K, R or H for basic amino acids
  MISC_FEATURE (16)..(16): X is N or Q for amidated amino acids
  MISC_FEATURE (17)..(17): X is T or S
XXXXXXXXXXXXXXXXX

SEQ ID NO: 498 - protein, 18 aa, Artificial
  Completely synthesized peptide construct
  MISC_FEATURE (1)..(1): X is acetyl or propionyl group, D glycine or D alanine, cyclohexylalanine at amino terminus
  MISC_FEATURE (2)..(2): X is T or S
  MISC_FEATURE (3)..(3): X is I, L or V
  MISC_FEATURE (4)..(4): X is K, R or H for basic amino acids
  MISC_FEATURE (5)..(5): X is I, L or V
  MISC_FEATURE (6)..(6): X is T or S
  MISC_FEATURE (7)..(7): X is I, L or V
  MISC_FEATURE (8)..(8): X is A and G
  MISC_FEATURE (9)..(9): X is I, L or V
  MISC_FEATURE (10)..(10): X is K, R or H for basic amino acids
  MISC_FEATURE (11)..(11): X is N or Q for amidated amino acids
  MISC_FEATURE (12)..(12): X is K, R or H for basic amino acids
  MISC_FEATURE (13)..(13): X is A and G
  MISC_FEATURE (14)..(14): X is D and E for acidic amino acids
  MISC_FEATURE (15)..(15): X is F or P
  MISC_FEATURE (16)..(16): X is K, R or H for basic amino acids
  MISC_FEATURE (17)..(17): X is N or Q for amidated amino acids
  MISC_FEATURE (18)..(18): X is T or S
XXXXXXXXXXXXXXXXXX

SEQ ID NO: 499 - protein, 17 aa, Homo sapiens
NVREGIAFRPASKTFTV

SEQ ID NO: 500 - protein, 17 aa, Artificial
  Completely synthesized peptide construct
  MISC_FEATURE (1)..(1): X is N or Q for amidated amino acids
  MISC_FEATURE (2)..(2): X is I, L or V
  MISC_FEATURE (3)..(3): X is K, R or H for basic amino acids
  MISC_FEATURE (4)..(4): X is D and E for acidic amino acids
  MISC_FEATURE (5)..(5): X is A and G
  MISC_FEATURE (6)..(5): X is I, L or V
  misc_feature (6)..(6): Xaa can be any naturally occurring amino acid
  MISC_FEATURE (7)..(7): X is A and G
  MISC_FEATURE (8)..(8): X is F or P
  MISC_FEATURE (9)..(9): X is K, R or H for basic amino acids
  MISC_FEATURE (10)..(10): X is F or P
  MISC_FEATURE (11)..(11): X is A and G
  MISC_FEATURE (12)..(12): X is T or S
  MISC_FEATURE (13)..(13): X is K, R or H for basic amino acids
  MISC_FEATURE (14)..(14): X is T or S
  MISC_FEATURE (15)..(15): X is F or P
  MISC_FEATURE (16)..(16): X is T or S
  MISC_FEATURE (17)..(17): X is I, L or V
XXXXXXXXXXXXXXXXX

SEQ ID NO: 501 - protein, 18 aa, Artificial
  Completely synthesized peptide construct
  MISC_FEATURE (1)..(1): X is aceytl or propionyl group, D glycine or D alanine, cyclohexylalanine at amino terminus
  MISC_FEATURE (2)..(2): X is N or Q for amidated amino acids
  MISC_FEATURE (3)..(3): X is I, L or V
  MISC_FEATURE (4)..(4): X is K, R or H for basic amino acids
  MISC_FEATURE (5)..(5): X is D and E for acidic amino acids
  MISC_FEATURE (6)..(6): X is A and G
  MISC_FEATURE (7)..(7): X is I, L or V
  MISC_FEATURE (8)..(8): X is A and G
  MISC_FEATURE (9)..(9): X is F or P
  MISC_FEATURE (10)..(10): X is K, R or H for basic amino acids
  MISC_FEATURE (11)..(11): X is F or P
  MISC_FEATURE (12)..(12): X is A and G
  MISC_FEATURE (13)..(13): X is T or S
  MISC_FEATURE (14)..(14): X is K, R or H for basic amino acids
  MISC_FEATURE (15)..(15): X is T or S
  MISC_FEATURE (16)..(16): X is F or P
  MISC_FEATURE (17)..(17): X is T or S
  MISC_FEATURE (18)..(18): X is I, L or V
XXXXXXXXXXXXXXXXXX

SEQ ID NO: 502 - protein, 14 aa, Artificial
  Completely synthesized peptide construct
  misc_feature (2)..(2): Xaa can be any naturally occurring amino acid
  misc_feature (9)..(9): Xaa can be any naturally occurring amino acid
EXIKFAAAXREGED

SEQ ID NO: 503 - protein, 14 aa, Artificial
  Completely synthesized peptide construct
  MISC_FEATURE (1)..(1): X is D and E for acidic amino acids
  MISC_FEATURE (2)..(2): X is A and G; D and E for acidic amino acids; I, L or V; K, R or H for basic amino acids; C or S; F, W or Y for aromatic amino acids; F or P; M or Nle (Norleucine); N or Q for amidated amino acids; and T or S
  MISC_FEATURE (3)..(3): X is I, L or V
  MISC_FEATURE (4)..(4): X is K, R or H for basic amino acids
  MISC_FEATURE (5)..(5): X is F or P
  MISC_FEATURE (6)..(6): X is A and G
  MISC_FEATURE (7)..(7): X is A and G
  MISC_FEATURE (8)..(8): X is A and G
  MISC_FEATURE (9)..(9): X is
  MISC_FEATURE (10)..(10): X is K, R or H for basic amino acids
  MISC_FEATURE (11)..(11): X is D and E for acidic amino acids
  MISC_FEATURE (12)..(12): X is A and G
  MISC_FEATURE (13)..(13): X is D and E for acidic amino acids
  MISC_FEATURE (14)..(14): X is D and E for acidic amino acids
XXXXXXXXXXXXXX

SEQ ID NO: 504 - protein, 15 aa, Artificial
  Completely synthesized peptide construct
  MISC_FEATURE (1)..(1): X is acetyl or propionyl group, D glycine or D alanine, cyclohexylalanine at amino terminus
  MISC_FEATURE (2)..(2): X is D and E for acidic amino acids
  MISC_FEATURE (3)..(3): X is A and G; D and E for acidic amino acids; I, L or V; K, R or H for basic amino acids; C or S; F, W or Y for aromatic amino acids; F or P; M or Nle (Norleucine); N or Q for amidated amino acids; and T or S
  MISC_FEATURE (4)..(4): X is I, L or V
  MISC_FEATURE (5)..(5): X is K, R or H for basic amino acids
  MISC_FEATURE (6)..(6): X is F or P
  MISC_FEATURE (7)..(7): X is A and G
  MISC_FEATURE (8)..(8): X is A and G
  MISC_FEATURE (9)..(9): X is A and G
  MISC_FEATURE (10)..(10): X is
  MISC_FEATURE (11)..(11): X is K, R or H for basic amino acids
  MISC_FEATURE (12)..(12): X is A and G
  MISC_FEATURE (13)..(13): X is A and G
  MISC_FEATURE (14)..(14): X is D and E for acidic amino acids
  MISC_FEATURE (15)..(15): X is D and E for acidic amino acids
XXXXXXXXXXXXXXX

SEQ ID NO: 505 - protein, 12 aa, Artificial
  Completely synthesized peptide construct
  MISC_FEATURE (1)..(1): X is GabaX for X2X3 or X3X2 or X2X3 or X3X2 or X3X3 or X2X2
  MISC_FEATURE (2)..(2): X is K, R or H for basic amino acids
  MISC_FEATURE (3)..(3): X is F or P
  MISC_FEATURE (4)..(4): X is A and G
  MISC_FEATURE (5)..(5): X is A and G
  MISC_FEATURE (6)..(6): X is A and G
  MISC_FEATURE (7)..(6): X is A and G; D and E for acidic amino acids; I, L or V; K, R or H for basic amino acids; C or S; F, W or Y for aromatic amino acids; F or P; M or Nle (Norleucine); N or Q for amidated amino acids; and T or S
  misc_feature (7)..(7): Xaa can be any naturally occurring amino acid
  MISC_FEATURE (8)..(8): X is K, R or H for basic amino acids
  MISC_FEATURE (9)..(9): X is D and E for acidic amino acids
  MISC_FEATURE (10)..(10): X is A and G
  MISC_FEATURE (11)..(11): X is D and E for acidic amino acids
  MISC_FEATURE (12)..(12): X is D and E for acidic amino acids
XXXXXXXXXXXX

SEQ ID NO: 506 - protein, 12 aa, Artificial
  Completely synthesized peptide construct
  MISC_FEATURE (1)..(1): X is 5-aminopentanoic acid for replacement of 3 or 4 amino acids of X2 and X3
  MISC_FEATURE (2)..(2): X is K, R or H for basic amino acids
  MISC_FEATURE (3)..(3): X is F or P
  MISC_FEATURE (4)..(4): X is A and G
  MISC_FEATURE (5)..(5): X is A and G
  MISC_FEATURE (6)..(6): X is A and G
  MISC_FEATURE (7)..(6): X is A and G; D and E for acidic amino acids; I, L or V; K, R or H for basic amino acids; C or S; F, W or Y for aromatic amino acids; F or P; M or Nle (Norleucine); N or Q for amidated amino acids; and T or S
  misc_feature (7)..(7): Xaa can be any naturally occurring amino acid
  MISC_FEATURE (8)..(8): X is K, R or H for basic amino acids
  MISC_FEATURE (9)..(9): X is D and E for acidic amino acids
  MISC_FEATURE (9)..(9): X is D and E for acidic amino acids
  MISC_FEATURE (10)..(10): X is A and G
  MISC_FEATURE (11)..(11): X is D and E for acidic amino acids
  MISC_FEATURE (12)..(12): X is D and E for acidic amino acids
XXXXXXXXXXXX

SEQ ID NO: 507 - protein, 11 aa, Artificial
  Completely synthesized peptide construct
  MISC_FEATURE (1)..(1): X is Gaba2 for X2X3 or X3X2 or X2X3 or X3X2 or X3X3 or X2X2
  MISC_FEATURE (2)..(2): X is K, R or H for basic amino acids
  MISC_FEATURE (3)..(3): X is F or P
  MISC_FEATURE (4)..(4): X is A and G
  MISC_FEATURE (5)..(5): X is A and G
  MISC_FEATURE (6)..(6): X is A and G
  MISC_FEATURE (7)..(7): X is A and G; D and E for acidic amino acids; I, L or V; K, R or H for basic amino acids; C or S; F, W or Y for aromatic amino acids; F or P; M or Nle (Norleucine); N or Q for amidated amino acids; and T or S
  MISC_FEATURE (8)..(8): X is K, R or H for basic amino acids
  MISC_FEATURE (9)..(9): X is D and E for acidic amino acids
  MISC_FEATURE (10)..(10): X is A and G
  MISC_FEATURE (11)..(11): GabaX for X2X3 or X3X2 or X2X3 or X3X2 or X3X3 or X2X2
XXXXXXXXXXX

SEQ ID NO: 508 - protein, 11 aa, Artificial
  Completely synthesized peptide construct
  MISC_FEATURE (1)..(1): X is 5-aminopentanoic acid for replacement fo 3 or 4 amino acids of X2 and X3
  MISC_FEATURE (2)..(2): X is K, R or H for basic amino acids
  MISC_FEATURE (3)..(3): X is F or P
  MISC_FEATURE (4)..(4): X is A and G
  MISC_FEATURE (5)..(5): X is A and G
  MISC_FEATURE (6)..(6): X is A and G
  MISC_FEATURE (7)..(6): X is A and G; D and E for acidic amino acids; I, L or V; K, R or H for basic amino acids; C or S; F, W or Y for aromatic amino acids; F or P; M or Nle (Norleucine); N or Q for amidated amino acids; and T or S
  misc_feature (7)..(7): Xaa can be any naturally occurring amino acid
  MISC_FEATURE (8)..(8): X is K, R or H for basic amino acids
  MISC_FEATURE (9)..(9): X is D and E for acidic amino acids
  MISC_FEATURE (10)..(10): X is A and G
  MISC_FEATURE (11)..(11): X is Gaba2 for X2X3 or X3X2 or X2X3 or X3X2 or X3X3 or X2X2
XXXXXXXXXXX

SEQ ID NO: 509 - protein, 13 aa, Artificial
  Completely synthesized peptide construct
  MISC_FEATURE (1)..(1): X is acetyl or propionyl group, D glycine or D alanine, cyclohexylalanine at amino terminus
  MISC_FEATURE (2)..(2): X is GabaX for X2X3 or X3X2 or X2X3 or X3X2 or X3X3 or X2X2
  MISC_FEATURE (3)..(3): X is K, R or H for basic amino acids
  MISC_FEATURE (4)..(4): X is F or P
  MISC_FEATURE (5)..(5): X is A and G
  MISC_FEATURE (6)..(6): X is A and G
  MISC_FEATURE (7)..(7): X is A and G
  MISC_FEATURE (8)..(8): X is
  MISC_FEATURE (9)..(9): X is K, R or H for basic amino acids
  MISC_FEATURE (10)..(10): X is D and E for acidic amino acids
  MISC_FEATURE (11)..(11): X is A and G
  MISC_FEATURE (12)..(12): X is D and E for acidic amino acids
  MISC_FEATURE (13)..(13): X is D and E for acidic amino acids
XXXXXXXXXXXXX

SEQ ID NO: 510 - protein, 13 aa, Artificial
  Completely synthesized peptide construct
  MISC_FEATURE (1)..(1): X is acetyl or propionyl group, D glycine or D alanine, cyclohexylalanie at amino terminus
  MISC_FEATURE (2)..(2): X is 5-aminipentanoic acid for replacement of 3 or 4 amino acids of X2 and X3
  MISC_FEATURE (3)..(3): X is K, R or H for basic amino acids
  MISC_FEATURE (4)..(4): X is F or P
  MISC_FEATURE (5)..(5): X is A and G
  MISC_FEATURE (6)..(6): X is A and G
  MISC_FEATURE (7)..(7): X is A and G
  MISC_FEATURE (8)..(8): X is
  MISC_FEATURE (9)..(9): X is K, R or H for basic amino acids
  MISC_FEATURE (10)..(10): X is D and E for acidic amino acids
  MISC_FEATURE (11)..(11): X is A and G
  MISC_FEATURE (12)..(12): X is D and E for acidic amino acids
  MISC_FEATURE (13)..(13): X is D and E for acidic amino acids
XXXXXXXXXXXXX

SEQ ID NO: 511 - protein, 12 aa, Artificial
  Completely synthesized peptide construct
  MISC_FEATURE (1)..(1): X is acetyl or propionyl group, D glycine or D alanine, cyclohexylalanine at amino terminus
  MISC_FEATURE (2)..(2): X is GabaX for X2X3 or X3X2 or X2X3 or X3X2 or X3X3 or X2X2
  MISC_FEATURE (3)..(3): X is K, R or H for basic amino acids
  MISC_FEATURE (4)..(4): X is F or P
  MISC_FEATURE (5)..(5): X is A and G
  MISC_FEATURE (6)..(6): X is A and G
  MISC_FEATURE (7)..(7): X is A and G
  MISC_FEATURE (8)..(8): X is
  MISC_FEATURE (9)..(9): X is K, R or H for basic amino acids
  MISC_FEATURE (10)..(10): X is D and E for acidic amino acids
  MISC_FEATURE (11)..(11): X is A and G
  MISC_FEATURE (12)..(12): X is GabaX for X2X3 or X3X2 or X2X3 or X3X2 or X3X3 or X2X2
XXXXXXXXXXXX

SEQ ID NO: 512 - protein, 12 aa, Artificial
  Completely synthesized peptide construct
  MISC_FEATURE (1)..(1): X is acetyl or propionyl group, D glycine or D alanine, cyclohexylalanine at amino terminus
  MISC_FEATURE (2)..(2): X is 5-aminopentanoic acid for replacement of 3 or 4 amino acids of X2 and X3
  MISC_FEATURE (3)..(3): X is K, R or H for basic amino acids
  MISC_FEATURE (4)..(4): X is F or P
  MISC_FEATURE (5)..(5): X is A and G
  MISC_FEATURE (6)..(6): X is A and G
  MISC_FEATURE (7)..(7): X is A and G
  MISC_FEATURE (8)..(8): X is
  MISC_FEATURE (9)..(9): X is K, R or H for basic amino acids
  MISC_FEATURE (10)..(10): X is D and E for acidic amino acids
  MISC_FEATURE (11)..(11): X is A and G
  MISC_FEATURE (12)..(12): X is GabaX for X2X3 or X3X2 or X2X3 or X3X2 or X3X3 or X2X2
XXXXXXXXXXXX

SEQ ID NO: 513 - protein, 13 aa, Artificial
  Completely synthesized peptide construct
PVVHFFKNIVTPR

SEQ ID NO: 514 - protein, 13 aa, Artificial
  Completely synthesized peptide construct
  MISC_FEATURE (1)..(1): X is F or P
  MISC_FEATURE (2)..(2): X is I, L or V
  MISC_FEATURE (3)..(3): X is I, L or V
  MISC_FEATURE (4)..(4): X is K, R or H for basic amino acids
  MISC_FEATURE (5)..(5): X is F or P
  MISC_FEATURE (6)..(6): X is F or P
  MISC_FEATURE (7)..(7): X is K, R or H for basic amino acids
  MISC_FEATURE (8)..(8): X is N or Q for amidated amino acids
  MISC_FEATURE (9)..(9): X is I, L or V
  MISC_FEATURE (10)..(10): X is I, L or V
  MISC_FEATURE (11)..(11): X is T or S
  MISC_FEATURE (12)..(12): X is F or P
  MISC_FEATURE (13)..(13): X is K, R or H for basic amino acids
XXXXXXXXXXXXX

SEQ ID NO: 515 - protein, 14 aa, Artificial
  Completely synthesized peptide construct
  MISC_FEATURE (1)..(1): X is acetyl or propionyl group, D glycine or D alanine, cyclohexylalanine at amino terminus
  MISC_FEATURE (2)..(2): X is F or P
  MISC_FEATURE (3)..(3): X is I, L or V
  MISC_FEATURE (4)..(4): X is I, L or V
  MISC_FEATURE (5)..(5): X is K, R or H for basic amino acids
  MISC_FEATURE (6)..(6): X is F or P
  MISC_FEATURE (7)..(7): X is F or P
  MISC_FEATURE (8)..(8): X is K, R or H for basic amino acids
  MISC_FEATURE (9)..(9): X is N or Q for amidated amino acids
  MISC_FEATURE (10)..(10): X is I, L or V
  MISC_FEATURE (11)..(11): X is I, L or V
  MISC_FEATURE (12)..(12): X is T or S
  MISC_FEATURE (13)..(13): X is F or P
  MISC_FEATURE (14)..(14): X is K, R or H for basic amino acids
XXXXXXXXXXXXXX

SEQ ID NO: 516 - protein, 12 aa, Artificial
  Completely synthesized peptide construct
  MISC_FEATURE (1)..(1): X is F or P
  MISC_FEATURE (2)..(2): X is GabaX for X2X3 or X3X2 or X2X3 or X3X2 or X3X3 or X2X2
  MISC_FEATURE (3)..(3): X is K, R or H for basic amino acids
  MISC_FEATURE (4)..(4): X is F or P
  MISC_FEATURE (5)..(5): X is F or P
  MISC_FEATURE (6)..(6): X is K, R or H for basic amino acids
  MISC_FEATURE (7)..(7): X is N or Q for amidated amino acids
  MISC_FEATURE (8)..(8): X is I, L or V
  MISC_FEATURE (9)..(9): X is I, L or V
  MISC_FEATURE (10)..(10): X is T or S
  MISC_FEATURE (11)..(11): X is F or P
  MISC_FEATURE (12)..(12): X is K, R or H for basic amino acids
XXXXXXXXXXXX

SEQ ID NO: 517 - protein, 13 aa, Artificial
  Completely synthesized peptide construct
  MISC_FEATURE (1)..(1): X is acetyl or propionyl group, D glycine or D alanine, cyclohexylalanine at amino terminus
  MISC_FEATURE (2)..(2): X is F or P
  MISC_FEATURE (3)..(3): X is GabaX for X2X3 or X3X2 or X2X3 or X3X2 or X3X3 or X2X2
  MISC_FEATURE (4)..(4): X is K, R or H for basic amino acids
  MISC_FEATURE (5)..(5): X is F or P
  MISC_FEATURE (6)..(6): X is F or P
  MISC_FEATURE (7)..(7): X is K, R or H for basic amino acids
  MISC_FEATURE (8)..(8): X is N or Q for amidated amino acids
  MISC_FEATURE (9)..(9): X is I, L or V
  MISC_FEATURE (10)..(10): X is I, L or V
  MISC_FEATURE (11)..(11): X is T or S
  MISC_FEATURE (12)..(12): X is F or P
  MISC_FEATURE (13)..(13): X is K, R or H for basic amino acids
XXXXXXXXXXXXX

SEQ ID NO: 518 - protein, 12 aa, Artificial
  Completely synthesized peptide construct
  MISC_FEATURE (1)..(1): X is F or P
  MISC_FEATURE (2)..(2): X is I, L or V
  MISC_FEATURE (3)..(3): X is I, L or V
  MISC_FEATURE (4)..(4): X is K, R or H for basic amino acids
  MISC_FEATURE (5)..(5): X is F or P
  MISC_FEATURE (6)..(6): X is F or P
  MISC_FEATURE (7)..(7): X is K, R or H for basic amino acids
  MISC_FEATURE (8)..(8): X is N or Q for amidated amino acids
  MISC_FEATURE (9)..(9): X is GabaX for X2X3 or X3X2 or X2X3 or X3X2 or X3X3 or X2X2
  MISC_FEATURE (10)..(10): X is T or S
  MISC_FEATURE (11)..(11): X is F or P
  MISC_FEATURE (12)..(12): X is K, R or H for basic amino acids
XXXXXXXXXXXX

SEQ ID NO: 519 - protein, 13 aa, Artificial
  Completely synthesized peptide construct
  MISC_FEATURE (1)..(1): X is acetyl or propionyl group, D glycine or D alanine, cyclohexylalanie at amino terminus
  MISC_FEATURE (2)..(2): X is F or P
  MISC_FEATURE (3)..(3): X is I, L or V
  MISC_FEATURE (4)..(4): X is I, L or V
  MISC_FEATURE (5)..(5): X is K, R or H for basic amino acids
  MISC_FEATURE (6)..(6): X is F or P
  MISC_FEATURE (7)..(7): X is F or P
  MISC_FEATURE (8)..(8): X is K, R or H for basic amino acids
  MISC_FEATURE (9)..(9): X is N or Q for amidated amino acids
  MISC_FEATURE (10)..(10): X is GabaX for X2X3 or X3X2 or X2X3 or X3X2 or X3X3 or X2X2
  MISC_FEATURE (11)..(11): X is T or S
  MISC_FEATURE (12)..(12): X is F or P
  MISC_FEATURE (13)..(13): X is K, R or H for basic amino acids
XXXXXXXXXXXXX

SEQ ID NO: 520 - protein, 13 aa, Artificial
  Completely synthesized peptide construct
  MISC_FEATURE (1)..(1): X is F or P
  MISC_FEATURE (2)..(2): X is I, L or V
  MISC_FEATURE (3)..(3): X is I, L or V
  MISC_FEATURE (4)..(4): X is K, R or H for basic amino acids
  MISC_FEATURE (5)..(5): X is F or P
  MISC_FEATURE (6)..(6): X is F or P
  MISC_FEATURE (7)..(7): X is N or Q for amidated amino acids
  MISC_FEATURE (8)..(8): X is I, L or V
  MISC_FEATURE (9)..(9): X is I, L or V
  MISC_FEATURE (10)..(10): X is T or S
  MISC_FEATURE (11)..(11): X is T or S
  MISC_FEATURE (12)..(12): X is F or P
  MISC_FEATURE (13)..(13): X is K, R or H for basic amino acids
XXXXXXXXXXXXX

SEQ ID NO: 521 - protein, 14 aa, Artificial
  Completely synthesized peptide construct
  MISC_FEATURE (1)..(1): X is acetyl or propionyl group, D glycine or D alanine, cyclodexylalanine at amino terminus
  MISC_FEATURE (2)..(2): X is F or P
  MISC_FEATURE (3)..(3): X is I, L or V
  MISC_FEATURE (4)..(4): X is I, L or V
  MISC_FEATURE (5)..(5): X is K, R or H for basic amino acids
  MISC_FEATURE (6)..(6): X is F or P
  MISC_FEATURE (7)..(7): X is F or P
  MISC_FEATURE (8)..(8): X is K, R or H for basic amino acids
  MISC_FEATURE (9)..(9): X is N or Q for amidated amino acids
  MISC_FEATURE (10)..(10): X is I, L or V
  MISC_FEATURE (11)..(11): X is I, L or V
  MISC_FEATURE (12)..(12): X is T or S
  MISC_FEATURE (13)..(13): X is F or P
  MISC_FEATURE (14)..(14): X is K, R or H for basic amino acids
XXXXXXXXXXXXXX

SEQ ID NO: 522 - protein, 11 aa, Artificial
  Completely synthesized peptide construct
  MISC_FEATURE (1)..(1): X is F or P
  MISC_FEATURE (2)..(2): X is GabaX for X2X3 or X3X2 or X2X3 or X3X2 or X3X3 or X2X2
  MISC_FEATURE (3)..(3): X is K, R or H for basic amino acids
  MISC_FEATURE (4)..(4): X is F or P
  MISC_FEATURE (5)..(5): X is F or P
  MISC_FEATURE (6)..(6): X is K, R or H for basic amino acids
  MISC_FEATURE (7)..(7): X is N or Q for amidated amino acids
  MISC_FEATURE (8)..(8): X is GabaX for X2X3 or X3X2 or X2X3 or X3X2 or X3X3 or X2X2
  MISC_FEATURE (9)..(9): X is T or S
  MISC_FEATURE (10)..(10): X is F or P
  MISC_FEATURE (11)..(11): X is K, R or H for basic amino acids
XXXXXXXXXXX

SEQ ID NO: 523 - protein, 12 aa, Artificial
  Completely synthesized peptide construct
  MISC_FEATURE (1)..(1): X is acetyl or propionyl group, D glycine or D alanine, cyclohexylalanine at amino terminus
  MISC_FEATURE (2)..(2): X is F or P
  MISC_FEATURE (3)..(3): X is GabaX for X2X3 or X3X2 or X2X3 or X3X2 or X3X3 or X2X2
  MISC_FEATURE (4)..(4): X is K, R or H for basic amino acids
  MISC_FEATURE (5)..(5): X is F or P
  MISC_FEATURE (6)..(6): X is F or P
  MISC_FEATURE (7)..(7): X is K, R or H for basic amino acids
  MISC_FEATURE (8)..(8): X is N or Q for amidated amino acids
  MISC_FEATURE (9)..(9): X is GabaX for X2X3 or X3X2 or X2X3 or X3X2 or X3X3 or X2X2
  MISC_FEATURE (10)..(10): X is T or S
  MISC_FEATURE (11)..(11): X is F or P
  MISC_FEATURE (12)..(12): X is K, R or H for basic amino acids
XXXXXXXXXXXX

SEQ ID NO: 524 - protein, 13 aa, Homo sapiens
HSLGKWLGHPDKF

SEQ ID NO: 525 - protein, 13 aa, Artificial
  Completely synthesized peptide construct
  MISC_FEATURE (1)..(1): X is K, R or H for basic amino acids
  MISC_FEATURE (2)..(2): X is T or S
  MISC_FEATURE (3)..(3): X is I, L or V
  MISC_FEATURE (4)..(4): X is A and G
  MISC_FEATURE (5)..(5): X is K, R or H for basic amino acids
  MISC_FEATURE (6)..(6): X is F, W or Y for aromatic amino acids
  MISC_FEATURE (7)..(7): X is I, L or V
  MISC_FEATURE (8)..(8): X is A and G
  MISC_FEATURE (9)..(9): X is K, R or H for basic amino acids
  MISC_FEATURE (10)..(10): X is F or P
  MISC_FEATURE (11)..(11): X is D and E for acidic amino acids
  MISC_FEATURE (12)..(12): X is K, R or H for basic amino acids
  MISC_FEATURE (13)..(13): X is F or P
XXXXXXXXXXXXX

SEQ ID NO: 526 - protein, 14 aa, Artificial
  Completely synthesized peptide construct
  MISC_FEATURE (1)..(1): X is acetyl or propionyl group, D glycine or D alanine, cyclohexylalanine at amino terminus
  MISC_FEATURE (2)..(2): X is K, R or H for basic amino acids
  MISC_FEATURE (3)..(3): X is T or S
  MISC_FEATURE (4)..(4): X is I, L or V
  MISC_FEATURE (5)..(5): X is A and G
  MISC_FEATURE (6)..(6): X is K, R or H for basic amino acids
  MISC_FEATURE (7)..(7): X is F, W or Y for aromatic amino acids
  MISC_FEATURE (8)..(8): X is I, L or V
  MISC_FEATURE (9)..(9): X is A and G
  MISC_FEATURE (10)..(10): X is K, R or H for basic amino acids
  MISC_FEATURE (11)..(11): X is F or P
  MISC_FEATURE (12)..(12): X is D and E for acidic amino acids
  MISC_FEATURE (13)..(13): X is K, R or H for basic amino acids
  MISC_FEATURE (14)..(14): X is F or P
XXXXXXXXXXXXXX

SEQ ID NO: 527 - protein, 11 aa, Homo sapiens
TEISFKLGQEF

SEQ ID NO: 528 - protein, 11 aa, Artificial
  Completely synthesized peptide construct
  MISC_FEATURE (1)..(1): X is T or S
  MISC_FEATURE (2)..(2): X is D and E for acidic amino acids
  MISC_FEATURE (3)..(3): X is I, L or V
  MISC_FEATURE (4)..(4): X is T or S
  MISC_FEATURE (5)..(5): X is F or P
  MISC_FEATURE (6)..(6): X is K, R or H for basic amino acids
  MISC_FEATURE (7)..(7): X is K, R or H for basic amino acids
  MISC_FEATURE (8)..(8): X is A and G
  MISC_FEATURE (9)..(9): X is N or Q for amidated amino acids
  MISC_FEATURE (10)..(10): X is D and E for acidic amino acids
  MISC_FEATURE (11)..(11): X is F or P
XXXXXXXXXXX

SEQ ID NO: 529 - protein, 10 aa, Artificial
  Completely synthesized peptide construct
  MISC_FEATURE (1)..(1): X is T or S
  MISC_FEATURE (2)..(2): X is GabaX for X2X3 or X3X2 or X2X3 or X3X2 or X3X3 or X2X2
  MISC_FEATURE (3)..(3): X is T or S
  MISC_FEATURE (4)..(4): X is F or P
  MISC_FEATURE (5)..(5): X is K, R or H for basic amino acids
  MISC_FEATURE (6)..(6): X is K, R or H for basic amino acids
  MISC_FEATURE (7)..(7): X is A and G
  MISC_FEATURE (8)..(8): X is N or Q for amidated amino acids
  MISC_FEATURE (9)..(9): X is D and E for acidic amino acids
  MISC_FEATURE (10)..(10): X is F or P
XXXXXXXXXX

SEQ ID NO: 530 - protein, 12 aa, Artificial
  Completely synthesized peptide construct
  MISC_FEATURE (1)..(1): X is acetyl or propionyl group, D glycine or D alanine, cyclohexylalanine at amino terminus
  MISC_FEATURE (2)..(2): X is T or S
  MISC_FEATURE (3)..(3): X is D and E for acidic amino acids
  MISC_FEATURE (4)..(4): X is I, L or V
  MISC_FEATURE (5)..(5): X is T or S
  MISC_FEATURE (6)..(6): X is F or P
  MISC_FEATURE (7)..(7): X is K, R or H for basic amino acids
  MISC_FEATURE (8)..(8): X is K, R or H for basic amino acids
  MISC_FEATURE (9)..(9): X is A and G
  MISC_FEATURE (10)..(10): X is N or Q for amidated amino acids
  MISC_FEATURE (11)..(11): X is D and E for acidic amino acids
  MISC_FEATURE (12)..(12): X is F or P
XXXXXXXXXXXX

SEQ ID NO: 531 - protein, 11 aa, Artificial
  Completely synthesized peptide construct
  MISC_FEATURE (1)..(1): X is acetyl or propionyl group, D glycine or D alanine, cyclohexylalanine at amino terminus
  MISC_FEATURE (2)..(2): X is T or S
  MISC_FEATURE (3)..(3): X is GabaX for X2X3 or X3X2 or X2X3 or X3X2 or X3X3 or X2X2
  MISC_FEATURE (4)..(4): X is T or S
  MISC_FEATURE (5)..(5): X is F or P
  MISC_FEATURE (6)..(6): X is K, R or H for basic amino acids
  MISC_FEATURE (7)..(7): X is K, R or H for basic amino acids
  MISC_FEATURE (8)..(8): X is A and G
  MISC_FEATURE (9)..(9): X is N or Q for amidated amino acids
  MISC_FEATURE (10)..(10): X is D and E for acidic amino acids
  MISC_FEATURE (11)..(11): X is F or P
XXXXXXXXXXX

SEQ ID NO: 532 - protein, 11 aa, Artificial
  Completely synthesized peptide construct
SLDGELKALFK

SEQ ID NO: 533 - protein, 11 aa, Artificial
  Completely synthesized peptide construct
  MISC_FEATURE (1)..(1): X is T or S
  MISC_FEATURE (2)..(2): X is I, L or V
  MISC_FEATURE (3)..(3): X is D and E for acidic amino acids
  MISC_FEATURE (4)..(4): X is A and G
  MISC_FEATURE (5)..(5): X is D and E for acidic amino acids
  MISC_FEATURE (6)..(6): X is I, L or V
  MISC_FEATURE (7)..(7): X is K, R or H for basic amino acids
  MISC_FEATURE (8)..(8): X is A and G
  MISC_FEATURE (9)..(9): X is I, L or V
  MISC_FEATURE (10)..(10): X is F or P
  MISC_FEATURE (11)..(11): X is K, R or H for basic amino acids
XXXXXXXXXXX

SEQ ID NO: 534 - protein, 10 aa, Artificial
  Completely synthesized peptide construct
  MISC_FEATURE (1)..(1): X is T or S
  MISC_FEATURE (2)..(2): X  is  GabaX for X2X3 or X3X2 or X2X3 or X3X2 or X3X3 or X2X2
  MISC_FEATURE (3)..(3): X is A and G
  MISC_FEATURE (4)..(4): X is D and E for acidic amino acids
  MISC_FEATURE (5)..(5): X is I, L or V
  MISC_FEATURE (6)..(6): X is K, R or H for basic amino acids
  MISC_FEATURE (7)..(7): X is A and G
  MISC_FEATURE (8)..(8): X is I, L or V
  MISC_FEATURE (9)..(9): X is F or P
  MISC_FEATURE (10)..(10): X is K, R or H for basic amino acids
XXXXXXXXXX

SEQ ID NO: 535 - protein, 10 aa, Artificial
  Completely synthesized peptide construct
  MISC_FEATURE (1)..(1): X is T or S
  MISC_FEATURE (2)..(2): X is I, L or V
  MISC_FEATURE (3)..(3): X is D and E for acidic amino acids
  MISC_FEATURE (4)..(4): X is A and G
  MISC_FEATURE (5)..(5): X is GabaX for X2X3 or X3X2 or X2X3 or X3X2 or X3X3 or X2X2
  MISC_FEATURE (6)..(6): X is K, R or H for basic amino acids
  MISC_FEATURE (7)..(7): X is A and G
  MISC_FEATURE (8)..(8): X is I, L or V
  MISC_FEATURE (9)..(9): X is F or P
  MISC_FEATURE (10)..(10): X is K, R or H for basic amino acids
XXXXXXXXXX

SEQ ID NO: 536 - protein, 9 aa, Artificial
  Completely synthesized peptide construct
  MISC_FEATURE (1)..(1): X is T or S
  MISC_FEATURE (2)..(2): X is GabaX for X2X3 or X3X2 or X2X3 or X3X2 or X3X3 or X2X2
  MISC_FEATURE (3)..(3): X is A and G
  MISC_FEATURE (4)..(4): X is GabaX for X2X3 or X3X2 or X2X3 or X3X2 or X3X3 or X2X2
  MISC_FEATURE (5)..(5): X is K, R or H for basic amino acids
  MISC_FEATURE (6)..(6): X is A and G
  MISC_FEATURE (7)..(7): X is I, L or V
  MISC_FEATURE (8)..(8): X is F or P
  MISC_FEATURE (9)..(9): X is K, R or H for basic amino acids
XXXXXXXXX

SEQ ID NO: 537 - protein, 12 aa, Artificial
  Completely synthesized peptide construct
  MISC_FEATURE (1)..(1): X is acetyl or proionyl group, D glycine or D alanine, cyclohexylalanine at amino terminus
  MISC_FEATURE (2)..(2): X is T or S
  MISC_FEATURE (3)..(3): X is I, L or V
  MISC_FEATURE (4)..(4): X is D and E for acidic amino acids
  MISC_FEATURE (5)..(5): X is A and G
  MISC_FEATURE (6)..(6): X is D and E for acidic amino acids
  MISC_FEATURE (7)..(7): X is I, L or V
  MISC_FEATURE (8)..(8): X is K, R or H for basic amino acids
  MISC_FEATURE (9)..(9): X is A and G
  MISC_FEATURE (10)..(10): X is I, L or V
  MISC_FEATURE (11)..(11): X is F or P
  MISC_FEATURE (12)..(12): X is K, R or H for basic amino acids
XXXXXXXXXXXX

SEQ ID NO: 538 - protein, 11 aa, Artificial
  Completely synthesized peptide construct
  MISC_FEATURE (1)..(1): X is aceytl or propionyl group, D glycine or D alanine, cyclohexylalanine at amino terminus
  MISC_FEATURE (2)..(2): X is T or S
  MISC_FEATURE (3)..(3): X is GabaX for X2X3 or X3X2 or X2X3 or X3X2 or X3X3 or X2X2
  MISC_FEATURE (4)..(4): X is A and G
  MISC_FEATURE (5)..(5): X is D and E for acidic amino acids
  MISC_FEATURE (6)..(6): X is I, L or V
  MISC_FEATURE (7)..(7): X is K, R or H for basic amino acids
  MISC_FEATURE (8)..(8): X is A and G
  MISC_FEATURE (9)..(9): X is I, L or V
  MISC_FEATURE (10)..(10): X is F or P
  MISC_FEATURE (11)..(11): X is K, R or H for basic amino acids
XXXXXXXXXXX

SEQ ID NO: 539 - protein, 11 aa, Artificial
  Completely synthesized peptide construct
  MISC_FEATURE (1)..(1): X is acetyl or propionyl group, D glycine or D alanine, cyclohexylalanine at amino terminus
  MISC_FEATURE (2)..(2): X is T or S
  MISC_FEATURE (3)..(3): X is I, L or V
  MISC_FEATURE (4)..(4): X is D and E for acidic amino acids
  MISC_FEATURE (5)..(5): X is A and G
  MISC_FEATURE (6)..(6): X is GabaX for X2X3 or X3X2 or X2X3 or X3X2 or X3X3 or X2X2
  MISC_FEATURE (7)..(7): X is K, R or H for basic amino acids
  MISC_FEATURE (8)..(8): X is A and G
  MISC_FEATURE (9)..(9): X is I, L or V
  MISC_FEATURE (10)..(10): X is F or P
  MISC_FEATURE (11)..(11): X is K, R or H for basic amino acids
XXXXXXXXXXX

SEQ ID NO: 540 - protein, 10 aa, Artificial
  Completely synthesized peptide construct
  MISC_FEATURE (1)..(1): X is aceytl or propionyl group, D glycine or D alanine, cyclohexylalanine at amino terminus
  MISC_FEATURE (2)..(2): X is T or S
  MISC_FEATURE (3)..(3): X is GabaX for X2X3 or X3X2 or X2X3 or X3X2 or X3X3 or X2X2
  MISC_FEATURE (4)..(4): X is A and G
  MISC_FEATURE (5)..(5): X is GabaX for X2X3 or X3X2 or X2X3 or X3X2 or X3X3 or X2X2
  MISC_FEATURE (6)..(6): X is K, R or H for basic amino acids
  MISC_FEATURE (7)..(7): X is A and G
  MISC_FEATURE (8)..(8): X is I, L or V
  MISC_FEATURE (9)..(9): X is F or P
  MISC_FEATURE (10)..(10): X is K, R or H for basic amino acids
XXXXXXXXXX

SEQ ID NO: 541 - protein, 7 aa, Artificial
  Completely synthesized peptide construct
FKNIVTP

SEQ ID NO: 542 - protein, 7 aa, Artificial
  Completely synthesized peptide construct
  MISC_FEATURE (1)..(1): X is F or P
  MISC_FEATURE (2)..(2): X is K, R or H for basic amino acids
  MISC_FEATURE (3)..(3): X is N or Q for amidated amino acids
  MISC_FEATURE (4)..(4): X is I, L or V
  MISC_FEATURE (5)..(5): X is I, L or V
  MISC_FEATURE (6)..(6): X is T or S
  MISC_FEATURE (7)..(7): X is F or P
XXXXXXX

SEQ ID NO: 543 - protein, 6 aa, Artificial
  Completely synthesized peptide construct
  MISC_FEATURE (1)..(1): X is F or P
  MISC_FEATURE (2)..(2): X is K, R or H for basic amino acids
  MISC_FEATURE (3)..(3): X is N or Q for amidated amino acids
  MISC_FEATURE (4)..(4): X is GabaX for X2X3 or X3X2 or X2X3 or X3X2 or X3X3 or X2X2
  MISC_FEATURE (5)..(5): X is T or S
  MISC_FEATURE (6)..(6): X is F or P
XXXXXX

SEQ ID NO: 544 - protein, 8 aa, Artificial
  Completely synthesized peptide construct
  MISC_FEATURE (1)..(1): X is acetyl or propionyl group, D glycine or D alanine, cyclohexylalanine at amino terminus
  MISC_FEATURE (2)..(2): X is F or P
  MISC_FEATURE (3)..(3): X is K, R or H for basic amino acids
  MISC_FEATURE (4)..(4): X is N or Q for amidated amino acids
  MISC_FEATURE (5)..(5): X is I, L or V
  MISC_FEATURE (6)..(6): X is I, L or V
  MISC_FEATURE (7)..(7): X is T or S
  MISC_FEATURE (8)..(8): X is F or P
XXXXXXXX

SEQ ID NO: 545 - protein, 7 aa, Artificial
  Completely synthesized peptide construct
  MISC_FEATURE (1)..(1): X is acetyl or propionyl group, D glycine or D alanine, cyclohexylalanine at amino terminus
  MISC_FEATURE (2)..(2): X is F or P
  MISC_FEATURE (3)..(3): X is K, R or H for basic amino acids
  MISC_FEATURE (4)..(4): X is N or Q for amidated amino acids
  MISC_FEATURE (5)..(5): X is GabaX for X2X3 or X3X2 or X2X3 or X3X2 or X3X3 or X2X2
  MISC_FEATURE (6)..(6): X is T or S
  MISC_FEATURE (7)..(7): X is F or P
XXXXXXX

SEQ ID NO: 546 - protein, 14 aa, Artificial
  Completely synthesized peptide construct
NTWTTCQSIAFPSK

SEQ ID NO: 547 - protein, 14 aa, Artificial
  Completely synthesized peptide construct
  MISC_FEATURE (1)..(1): X is N or Q for amidated amino acids
  MISC_FEATURE (2)..(2): X is T or S
  MISC_FEATURE (3)..(3): X is F, W or Y for aromatic amino acids
  MISC_FEATURE (4)..(4): X is T or S
  MISC_FEATURE (5)..(5): X is T or S
  MISC_FEATURE (6)..(6): X is C or S
  MISC_FEATURE (7)..(7): X is N or Q for amidated amino acids
  MISC_FEATURE (8)..(8): X is M or Nle (Norleucine)
  MISC_FEATURE (9)..(9): X is I, L or V
  MISC_FEATURE (10)..(10): X is A and G
  MISC_FEATURE (11)..(11): X is F or P
  MISC_FEATURE (12)..(12): X is F or P
  MISC_FEATURE (13)..(13): X is T or S
  MISC_FEATURE (14)..(14): X is K, R or H for basic amino acids
XXXXXXXXXXXXXX

SEQ ID NO: 548 - protein, 15 aa, Artificial
  Completely synthesized peptide construct
  MISC_FEATURE (1)..(1): X is acetyl or propionyl group, D glycine or D alanine, cyclohexylalanine at amino terminus
  MISC_FEATURE (2)..(2): X is N or Q for amidated amino acids
  MISC_FEATURE (3)..(3): X is T or S
  MISC_FEATURE (4)..(4): X is F, W or Y for aromatic amino acids
  MISC_FEATURE (5)..(5): X is T or S
  MISC_FEATURE (6)..(6): X is T or S
  MISC_FEATURE (7)..(7): X is C or S
  MISC_FEATURE (8)..(8): X is N or Q for amidated amino acids
  MISC_FEATURE (9)..(9): X is T or S
  MISC_FEATURE (10)..(10): X is I, L or V
  MISC_FEATURE (11)..(11): X is A and G
  MISC_FEATURE (12)..(12): X is F or P
  MISC_FEATURE (13)..(13): X is F or P
  MISC_FEATURE (14)..(14): X is T or S
  MISC_FEATURE (15)..(15): X is K, R or H for basic amino acids
XXXXXXXXXXXXXXX

SEQ ID NO: 549 - protein, 18 aa, Homo sapiens
IYFNTWTTCQSIAFPSKT

SEQ ID NO: 550 - protein, 18 aa, Artificial
  Completely synthesized peptide construct
  MISC_FEATURE (1)..(1): X is I, L or V
  MISC_FEATURE (2)..(2): X is F, W or Y for aromatic amino acids
  MISC_FEATURE (3)..(3): X is F, W or Y for aromatic amino acids
  MISC_FEATURE (4)..(4): X is N or Q for amidated amino acids
  MISC_FEATURE (5)..(5): X is T or S
  MISC_FEATURE (6)..(6): X is F, W or Y for aromatic amino acids
  MISC_FEATURE (7)..(7): X is T or S
  MISC_FEATURE (8)..(8): X is T or S
  MISC_FEATURE (9)..(9): X is C or S
  MISC_FEATURE (10)..(10): X is N or Q for amidated amino acids
  MISC_FEATURE (11)..(11): X is T or s
  MISC_FEATURE (12)..(12): X is I, L or V
  MISC_FEATURE (13)..(13): X is A and G
  MISC_FEATURE (14)..(14): X is F or P
  MISC_FEATURE (15)..(15): X is F or P
  MISC_FEATURE (16)..(16): X is T or S
  MISC_FEATURE (17)..(17): X is K, R or H for basic amino acids
  MISC_FEATURE (18)..(18): X is T or S
XXXXXXXXXXXXXXXXXX

SEQ ID NO: 551 - protein, 19 aa, Artificial
  Completely synthesized peptide construct
  MISC_FEATURE (1)..(1): X is acetyl or propionyl group, D glycine or D alanine, cyclohexylalanine at amino terminus
  MISC_FEATURE (2)..(2): X is I, L or V
  MISC_FEATURE (3)..(3): X is F, W or Y for aromatic amino acids
  MISC_FEATURE (4)..(4): X is F, W or Y or aromatic amino acids
  MISC_FEATURE (5)..(5): X is N or Q for amidated amino acids
  MISC_FEATURE (6)..(6): X is T or S
  MISC_FEATURE (7)..(7): X is F, W or Y for aromatic amino acids
  MISC_FEATURE (8)..(8): X is T or S
  MISC_FEATURE (9)..(9): X is T or S
  MISC_FEATURE (10)..(10): X is C or S
  MISC_FEATURE (11)..(11): X is N or Q for amidated amino acids
  MISC_FEATURE (12)..(12): X is T or S
  MISC_FEATURE (13)..(13): X is I, L or V
  MISC_FEATURE (14)..(14): X is A and G
  MISC_FEATURE (15)..(15): X is F or P
  MISC_FEATURE (16)..(16): X is F or P
  MISC_FEATURE (17)..(17): X is T or S
  MISC_FEATURE (18)..(18): X is K, R or H for basic amino acids
  MISC_FEATURE (19)..(19): X is T or S
XXXXXXXXXXXXXXXXXXX

SEQ ID NO: 552 - protein, 23 aa, Homo sapiens
QKFSEHFSIHCCPPFTFLNSSKR

SEQ ID NO: 553 - protein, 23 aa, Artificial
  Completely synthesized peptide construct
  MISC_FEATURE (1)..(1): X is N or Q for amidated amino acids
  MISC_FEATURE (2)..(2): X is K, R or H for basic amino acids
  MISC_FEATURE (3)..(3): X is F, W or Y for aromatic amino acids
  MISC_FEATURE (4)..(4): X is T or S
  MISC_FEATURE (5)..(5): X is D and E for acidic amino acids
  MISC_FEATURE (6)..(6): X is K, R or H for basic amino acids
  MISC_FEATURE (7)..(7): X is F or P
  MISC_FEATURE (8)..(8): X is T or S
  MISC_FEATURE (9)..(9): X is I, L or V
  MISC_FEATURE (10)..(10): X is K, R or H for basic amino acids
  MISC_FEATURE (11)..(11): X is C or S
  MISC_FEATURE (12)..(12): X is C or S
  MISC_FEATURE (13)..(13): X is F or P
  MISC_FEATURE (14)..(14): X is F or P
  MISC_FEATURE (15)..(15): X is F, W or Y for aromatic amino acids
  MISC_FEATURE (16)..(16): X is T or S
  MISC_FEATURE (17)..(17): X is F, W or Y for aromatic amino acids
  MISC_FEATURE (18)..(18): X is I, L or V
  MISC_FEATURE (19)..(19): X is N or Q for amidated amino acids
  MISC_FEATURE (20)..(20): X is T or S
  MISC_FEATURE (21)..(21): X is T or S
  MISC_FEATURE (22)..(22): X is K, R or H for basic amino acids
  MISC_FEATURE (23)..(23): X is K, R or H for basic amino acids
XXXXXXXXXXXXXXXXXXXXXXX

SEQ ID NO: 554 - protein, 24 aa, Artificial
  Completely synthesized peptide construct
  MISC_FEATURE (1)..(1): X is acetyl or propionyl group, D glycine or D alanine, cyclohexylalanine at amino terminus
  MISC_FEATURE (2)..(2): X is N or Q for amidated amino acids
  MISC_FEATURE (3)..(3): X is K, R or H for basic amino acids
  MISC_FEATURE (4)..(4): X is F, W or Y for aromatic amino acids
  MISC_FEATURE (5)..(5): X is T or S
  MISC_FEATURE (6)..(6): X is D and E for acidic amino acids
  MISC_FEATURE (7)..(7): X is K, R or H for basic amino acids
  MISC_FEATURE (8)..(8): X is F or P
  MISC_FEATURE (9)..(9): X is T or S
  MISC_FEATURE (10)..(10): X is K, R or H for basic amino acids
  MISC_FEATURE (11)..(11): X is K, R or H for basic amino acids
  MISC_FEATURE (12)..(12): X is C or S
  MISC_FEATURE (13)..(13): X is C or S
  MISC_FEATURE (14)..(14): X is F or P
  MISC_FEATURE (15)..(15): X is F or P
  MISC_FEATURE (16)..(16): X is F, W or Y for aromatic amino acids
  MISC_FEATURE (17)..(17): X is T or S
  MISC_FEATURE (18)..(18): X is F, W or Y for aromatic amino acids
  MISC_FEATURE (19)..(19): X is I, L or V
  MISC_FEATURE (20)..(20): X is N or Q for amidated amino acids
  MISC_FEATURE (21)..(21): X is T or S
  MISC_FEATURE (22)..(22): X is T or S
  MISC_FEATURE (23)..(23): X is K, R or H for basic amino acids
  MISC_FEATURE (24)..(24): X is K, R or H for basic amino acids
XXXXXXXXXXXXXXXXXXXXXXXX

SEQ ID NO: 555 - protein, 20 aa, Homo sapiens
GQFRVIGPRHPIRALVGDEV

SEQ ID NO: 556 - protein, 20 aa, Artificial
  Completely synthesized peptide construct
  MISC_FEATURE (1)..(1): X is A and G
  MISC_FEATURE (2)..(2): X is N or Q for amidated amino acids
  MISC_FEATURE (3)..(3): X is F, W or Y for aromatic amino acids
  MISC_FEATURE (4)..(4): X is K, R or H for basic amino acids
  MISC_FEATURE (5)..(5): X is I, L or V
  MISC_FEATURE (6)..(6): X is I, L or V
  MISC_FEATURE (7)..(7): X is A and G
  MISC_FEATURE (8)..(8): X is F or P
  MISC_FEATURE (9)..(9): X is K, R or H for basic amino acids
  MISC_FEATURE (10)..(10): X is K, R or H for basic amino acids
  MISC_FEATURE (11)..(11): X is F or P
  MISC_FEATURE (12)..(12): X is I, L or V
  MISC_FEATURE (13)..(13): X is K, R or H for basic amino acids
  MISC_FEATURE (14)..(14): X is A and G
  MISC_FEATURE (15)..(15): X is I, L or V
  MISC_FEATURE (16)..(16): X is I, L or V
  MISC_FEATURE (17)..(17): X is A and G
  MISC_FEATURE (18)..(18): X is D and E for acidic amino acids
  MISC_FEATURE (19)..(19): X is D and E for acidic amino acids
  MISC_FEATURE (20)..(20): X is I, L or V
XXXXXXXXXXXXXXXXXXXX

SEQ ID NO: 557 - protein, 20 aa, Artificial
  Completely synthesized peptide construct
  MISC_FEATURE (1)..(1): X is A and G
  MISC_FEATURE (2)..(2): X is N or Q for amidated amino acids
  MISC_FEATURE (3)..(3): X is F, W or Y for aromatic amino acids
  MISC_FEATURE (4)..(4): X is K, R or H for basic amino acids
  MISC_FEATURE (5)..(5): X is I, L or V
  MISC_FEATURE (6)..(6): X is I, L or V
  MISC_FEATURE (7)..(7): X is A and G
  MISC_FEATURE (8)..(8): X is F or P
  MISC_FEATURE (9)..(9): X is K, R or H for basic amino acids
  MISC_FEATURE (10)..(10): X is K, R or H for basic amino acids
  MISC_FEATURE (11)..(11): X is F or P
  MISC_FEATURE (12)..(12): X is I, L or V
  MISC_FEATURE (13)..(13): X is K, R or H for basic amino acids
  MISC_FEATURE (14)..(14): X is A and G
  MISC_FEATURE (15)..(15): X is I, L or V
  MISC_FEATURE (16)..(16): X is I, L or V
  MISC_FEATURE (17)..(17): X is A and G
  MISC_FEATURE (18)..(18): X is D and E for acidic amino acids
  MISC_FEATURE (19)..(19): X is D and E for acidic amino acids
  MISC_FEATURE (20)..(20): X is I, L or V
XXXXXXXXXXXXXXXXXXXX

SEQ ID NO: 558 - protein, 19 aa, Artificial
  Completely synthesized peptide construct
  MISC_FEATURE (1)..(1): X is A and G
  MISC_FEATURE (2)..(2): X is N or Q for amidated amino acids
  MISC_FEATURE (3)..(3): X is F, W or Y for aromatic amino acids
  MISC_FEATURE (4)..(4): X is K, R or H for basic amino acids
  MISC_FEATURE (5)..(5): X is GabaX for X2X3 or X3X2 or X2X3 or X3X2 or X3X3 or X2X2
  MISC_FEATURE (6)..(6): X is A and G
  MISC_FEATURE (7)..(7): X is F or P
  MISC_FEATURE (8)..(8): X is K, R or H for basic amino acids
  MISC_FEATURE (9)..(9): X is K, R or H for basic amino acids
  MISC_FEATURE (10)..(10): X is F or P
  MISC_FEATURE (11)..(11): X is I, L or V
  MISC_FEATURE (12)..(12): X is K, R or H for basic amino acids
  MISC_FEATURE (13)..(13): X is A and G
  MISC_FEATURE (14)..(14): X is I, L or V
  MISC_FEATURE (15)..(15): X is I, L or V
  MISC_FEATURE (16)..(16): X is A and G
  MISC_FEATURE (17)..(17): X is D and E for acidic amino acids
  MISC_FEATURE (18)..(18): X is D and E for acidic amino acids
  MISC_FEATURE (19)..(19): X is I, L or V
XXXXXXXXXXXXXXXXXXX

SEQ ID NO: 559 - protein, 19 aa, Artificial
  Completely synthesized peptide construct
  MISC_FEATURE (1)..(1): X is A and G
  MISC_FEATURE (2)..(2): X is N or Q for amidated amino acids
  MISC_FEATURE (3)..(3): X is F, W or Y for aromatic amino acids
  MISC_FEATURE (4)..(4): X is K, R or H for basic amino acids
  MISC_FEATURE (5)..(5): X is I, L or V
  MISC_FEATURE (6)..(6): X is I, L or V
  MISC_FEATURE (7)..(7): X is A and G
  MISC_FEATURE (8)..(8): X is F or P
  MISC_FEATURE (9)..(9): X is K, R or H for basic amino acids
  MISC_FEATURE (10)..(10): X is K, R or H for basic amino acids
  MISC_FEATURE (11)..(11): X is F or P
  MISC_FEATURE (12)..(12): X is I, L or V
  MISC_FEATURE (13)..(13): X is K, R or H for basic amino acids
  MISC_FEATURE (14)..(14): X is A and G
  MISC_FEATURE (15)..(15): X is GabaX for X2X3 or X3X2 or X2X3 or X3X2 or X3X3 or X2X2
  MISC_FEATURE (16)..(16): X is A and G
  MISC_FEATURE (17)..(17): X is D and E for acidic amino acids
  MISC_FEATURE (18)..(18): X is D and E for acidic amino acids
  MISC_FEATURE (19)..(19): X is I, L or V
XXXXXXXXXXXXXXXXXXX

SEQ ID NO: 560 - protein, 18 aa, Artificial
  Completely synthesized peptide construct
  MISC_FEATURE (1)..(1): X is A and G
  MISC_FEATURE (2)..(2): X is N or Q for amidated amino acids
  MISC_FEATURE (3)..(3): X is F, W or Y for aromatic amino acids
  MISC_FEATURE (4)..(4): X is K, R or H for basic amino acids
  MISC_FEATURE (5)..(5): X is I, L or V
  MISC_FEATURE (6)..(6): X is I, L or V
  MISC_FEATURE (7)..(7): X is A and G
  MISC_FEATURE (8)..(8): X is F or P
  MISC_FEATURE (9)..(9): X is K, R or H for basic amino acids
  MISC_FEATURE (10)..(10): X is K, R or H for basic amino acids
  MISC_FEATURE (11)..(11): X is F or P
  MISC_FEATURE (12)..(12): X is I, L or V
  MISC_FEATURE (13)..(13): X is K, R or H for basic amino acids
  MISC_FEATURE (14)..(14): X is A and G
  MISC_FEATURE (15)..(15): X is I, L or V
  MISC_FEATURE (16)..(16): X is I, L or V
  MISC_FEATURE (17)..(17): X is A and G
  MISC_FEATURE (18)..(18): X is GabaX for X2X3 or X3X2 or X2X3 or X3X2 or X3X3 or X2X2
XXXXXXXXXXXXXXXXXX

SEQ ID NO: 561 - protein, 18 aa, Artificial
  Completely synthesized peptide construct
  MISC_FEATURE (1)..(1): X is A and G
  MISC_FEATURE (2)..(2): X is N or Q for amidated amino acids
  MISC_FEATURE (3)..(3): X is F, W or Y for aromatic amino acids
  MISC_FEATURE (4)..(4): X is K, R or H for basic amino acids
  MISC_FEATURE (5)..(5): X is GabaX for X2X3 or X3X2 or X2X3 or X3X2 or X3X3 or X2X2
  MISC_FEATURE (6)..(6): X is A and G
  MISC_FEATURE (7)..(7): X is F or P
  MISC_FEATURE (8)..(8): X is K, R or H for basic amino acids
  MISC_FEATURE (9)..(9): X is K, R or H for basic amino acids
  MISC_FEATURE (10)..(10): X is F or P
  MISC_FEATURE (11)..(11): X is I, L or V
  MISC_FEATURE (12)..(12): X is K, R or H for basic amino acids
  MISC_FEATURE (13)..(13): X is A and G
  MISC_FEATURE (14)..(14): X is GabaX for X2X3 or X3X2 or X2X3 or X3X2 or X3X3 or X2X2
  MISC_FEATURE (15)..(15): X is A and G
  MISC_FEATURE (16)..(16): X is D and E for acidic amino acids
  MISC_FEATURE (17)..(17): X is D and E for acidic amino acids
  MISC_FEATURE (18)..(18): X is I, L or V
XXXXXXXXXXXXXXXXXX

SEQ ID NO: 562 - protein, 16 aa, Artificial
  Completely synthesized peptide construct
  MISC_FEATURE (1)..(1): X is A and G
  MISC_FEATURE (2)..(2): X is N or Q for amidated amino acids
  MISC_FEATURE (3)..(3): X is F, W or Y for aromatic amino acids
  MISC_FEATURE (4)..(4): X is K, R or H for basic amino acids
  MISC_FEATURE (5)..(5): X is GabaX for X2X3 or X3X2 or X2X3 or X3X2 or X3X3 or X2X2
  MISC_FEATURE (6)..(6): X is A and G
  MISC_FEATURE (7)..(7): X is F or P
  MISC_FEATURE (8)..(8): X is K, R or H for basic amino acids
  MISC_FEATURE (9)..(9): X is K, R or H for basic amino acids
  MISC_FEATURE (10)..(10): X is F or P
  MISC_FEATURE (11)..(11): X is I, L or V
  MISC_FEATURE (12)..(12): X is K, R or H for basic amino acids
  MISC_FEATURE (13)..(13): X is A and G
  MISC_FEATURE (14)..(14): X is GabaX for X2X3 or X3X2 or X2X3 or X3X2 or X3X3 or X2X2
  MISC_FEATURE (15)..(15): X is A and G
  MISC_FEATURE (16)..(16): X is GabaX for X2X3 or X3X2 or X2X3 or X3X2 or X3X3 or X2X2
XXXXXXXXXXXXXXXX

SEQ ID NO: 563 - protein, 17 aa, Artificial
  Completely synthesized peptide construct
  MISC_FEATURE (1)..(1): X is acetyl or propionyl group, D glycine or D alanine, cyclohexylalanine at amino terminus
  MISC_FEATURE (2)..(2): X is A and G
  MISC_FEATURE (3)..(3): X is N or Q for amidated amino acids
  MISC_FEATURE (4)..(4): X is F, W or Y for aromatic amino acids
  MISC_FEATURE (5)..(5): X is K, R or H for basic amino acids
  MISC_FEATURE (6)..(6): X is GabaX for X2X3 or X3X2 or X2X3 or X3X2 or X3X3 or X2X2
  MISC_FEATURE (7)..(7): X is A and G
  MISC_FEATURE (8)..(8): X is F or P
  MISC_FEATURE (9)..(9): X is K, R or H for basic amino acids
  MISC_FEATURE (10)..(10): X is K, R or H for basic amino acids
  MISC_FEATURE (11)..(11): X is F or P
  MISC_FEATURE (12)..(12): X is I, L or V
  MISC_FEATURE (13)..(13): X is K, R or H for basic amino acids
  MISC_FEATURE (14)..(14): X is A and G
  MISC_FEATURE (15)..(15): X is GabaX for X2X3 or X3X2 or X2X3 or X3X2 or X3X3 or X2X2
  MISC_FEATURE (16)..(16): X is A and G
  MISC_FEATURE (17)..(17): X is GabaX for X2X3 or X3X2 or X2X3 or X3X2 or X3X3 or X2X2
XXXXXXXXXXXXXXXXX

SEQ ID NO: 564 - protein, 21 aa, Artificial
  Completely synthesized peptide construct
  MISC_FEATURE (1)..(1): X is acetyl or propionyl group, D glycine or D alanine, cyclodexylalanine at amino terminus
  MISC_FEATURE (2)..(2): X is A and G
  MISC_FEATURE (3)..(3): X is N or Q for amidated amino acids
  MISC_FEATURE (4)..(4): X is F, W or Y for aromatic amino acids
  MISC_FEATURE (5)..(5): X is K, R or H for basic amino acids
  MISC_FEATURE (6)..(6): X is I, L or V
  MISC_FEATURE (7)..(7): X is I, L or V
  MISC_FEATURE (8)..(8): X is A and G
  MISC_FEATURE (9)..(9): X is F or P
  MISC_FEATURE (10)..(10): X is K, R or H for basic amino acids
  MISC_FEATURE (11)..(11): X is K, R or H for basic amino acids
  MISC_FEATURE (12)..(12): X is F or P
  MISC_FEATURE (13)..(13): X is I, L or V
  MISC_FEATURE (14)..(14): X is K, R or H for basic amino acids
  MISC_FEATURE (15)..(15): X is A and G
  MISC_FEATURE (16)..(16): X is I, L or V
  MISC_FEATURE (17)..(17): X is I, L or V
  MISC_FEATURE (18)..(18): X is A and G
  MISC_FEATURE (19)..(19): X is D and E for acidic amino acids
  MISC_FEATURE (20)..(20): X is D and E for acidic amino acids
  MISC_FEATURE (21)..(21): X is I, L or V
XXXXXXXXXXXXXXXXXXXXX

SEQ ID NO: 565 - protein, 21 aa, Artificial
  Completely synthesized peptide construct
  MISC_FEATURE (1)..(1): X is acetyl or propionyl group, D glycine or D alanine, cyclohexylalanine at amino terminus
  MISC_FEATURE (2)..(2): X is A and G
  MISC_FEATURE (3)..(3): X is N or Q for amidated amino acids
  MISC_FEATURE (4)..(4): X is F, W or Y for aromatic amino acids
  MISC_FEATURE (5)..(5): X is K, R or H for basic amino acids
  MISC_FEATURE (6)..(6): X is I, L or V
  MISC_FEATURE (7)..(7): X is I, L or V
  MISC_FEATURE (8)..(8): X is A and G
  MISC_FEATURE (9)..(9): X is F or P
  MISC_FEATURE (10)..(10): X is K, R or H for basic amino acids
  MISC_FEATURE (11)..(11): X is K, R or H for basic amino acids
  MISC_FEATURE (12)..(12): X is F or P
  MISC_FEATURE (13)..(13): X is I, L or V
  MISC_FEATURE (14)..(14): X is K, R or H for basic amino acids
  MISC_FEATURE (15)..(15): X is A and G
  MISC_FEATURE (16)..(16): X is I, L or V
  MISC_FEATURE (17)..(17): X is I, L or V
  MISC_FEATURE (18)..(18): X is A and G
  MISC_FEATURE (19)..(19): X is D and E for acidic amino acids
  MISC_FEATURE (20)..(20): X is D and E for acidic amino acids
  MISC_FEATURE (21)..(21): X is I, L or V
XXXXXXXXXXXXXXXXXXXXX

SEQ ID NO: 566 - protein, 20 aa, Artificial
  Completely synthesized peptide construct
  MISC_FEATURE (1)..(1): X is acetyl or propionyl group, D glycine or D alanine, cyclodexylalanine at amino terminus
  MISC_FEATURE (2)..(2): X is A and G
  MISC_FEATURE (3)..(3): X is N or Q for amidated amino terminus
  MISC_FEATURE (4)..(4): X is F, W or Y for aromatic amino acids
  MISC_FEATURE (5)..(5): X is K, R or H for basic amino acids
  MISC_FEATURE (6)..(6): X is GabaX for X2X3 or X3X2 or X2X3 or X3X2 or X3X3 or X2X2
  MISC_FEATURE (7)..(7): X is A and G
  MISC_FEATURE (8)..(8): X is F or P
  MISC_FEATURE (9)..(9): X is K, R or H for basic amino acids
  MISC_FEATURE (10)..(10): X is K, R or H for basic amino acids
  MISC_FEATURE (11)..(11): X is F or P
  MISC_FEATURE (12)..(12): X is I, L or V
  MISC_FEATURE (13)..(13): X is K, R or H for basic amino acids
  MISC_FEATURE (14)..(14): X is A and G
  MISC_FEATURE (15)..(15): X is I, L or V
  MISC_FEATURE (16)..(16): X is I, L or V
  MISC_FEATURE (17)..(17): X is A and G
  MISC_FEATURE (18)..(18): X is D and E for acidic amino acids
  MISC_FEATURE (19)..(19): X is D and E for acidic amino acids
  MISC_FEATURE (20)..(20): X is I, L or V
XXXXXXXXXXXXXXXXXXXX

SEQ ID NO: 567 - protein, 20 aa, Artificial
  Completely synthesized peptide construct
  MISC_FEATURE (1)..(1): X is acetyl or propionyl group, D glycine or D alanine, cyclohexylalanine at amino terminus
  MISC_FEATURE (2)..(2): X is A and G
  MISC_FEATURE (3)..(3): X is N or Q for amidated amino acids
  MISC_FEATURE (4)..(4): X is F, W or Y for aromatic amino acids
  MISC_FEATURE (5)..(5): X is K, R or H for basic amino acids
  MISC_FEATURE (6)..(6): X is I, L or V
  MISC_FEATURE (7)..(7): X is I, L or V
  MISC_FEATURE (8)..(8): X is A and G
  MISC_FEATURE (9)..(9): X is F or P
  MISC_FEATURE (10)..(10): X is K, R or H for basic amino acids
  MISC_FEATURE (11)..(11): X is K, R or H for basic amino acids
  MISC_FEATURE (12)..(12): X is F or P
  MISC_FEATURE (13)..(13): X is I, L or V
  MISC_FEATURE (14)..(14): X is K, R or H for basic amino acids
  MISC_FEATURE (15)..(15): X is A and G
  MISC_FEATURE (16)..(16): X is GabaX for X2X3 or X3X2 or X2X3 or X3X2 or X3X3 or X2X2
  MISC_FEATURE (17)..(17): X is A and G
  MISC_FEATURE (18)..(18): X is D and E for acidic amino acids
  MISC_FEATURE (19)..(19): X is D and E for acidic amino acids
  MISC_FEATURE (20)..(20): X is I, L or V
XXXXXXXXXXXXXXXXXXXX

SEQ ID NO: 568 - protein, 19 aa, Artificial
  Completely synthesized peptide construct
  MISC_FEATURE (1)..(1): X is acetyl or propionyl group, D glycine or D alanine, cyclohexylalanine at amino terminus
  MISC_FEATURE (2)..(2): X is A and G
  MISC_FEATURE (3)..(3): X is N or Q for amidated amino acids
  MISC_FEATURE (4)..(4): X is F, W or Y for aromatic amino acids
  MISC_FEATURE (5)..(5): X is K, R or H for basic amino acids
  MISC_FEATURE (6)..(6): X is I, L or V
  MISC_FEATURE (7)..(7): X is I, L or V
  MISC_FEATURE (8)..(8): X is A and G
  MISC_FEATURE (9)..(9): X is F or P
  MISC_FEATURE (10)..(10): X is K, R or H for basic amino acids
  MISC_FEATURE (11)..(11): X is K, R or H for basic amino acids
  MISC_FEATURE (12)..(12): X is F or P
  MISC_FEATURE (13)..(13): X is I, L or V
  MISC_FEATURE (14)..(14): X is K, R or H for basic amino acids
  MISC_FEATURE (15)..(15): X is A and G
  MISC_FEATURE (16)..(16): X is I, L or V
  MISC_FEATURE (17)..(17): X is I, L or V
  MISC_FEATURE (18)..(18): X is A and G
  MISC_FEATURE (19)..(19): X is GabaX for X2X3 or X3X2 or X2X3 or X3X2 or X3X3 or X2X2
XXXXXXXXXXXXXXXXXXX

SEQ ID NO: 569 - protein, 19 aa, Artificial
  Completely synthesized peptide construct
  MISC_FEATURE (1)..(1): X is acetyl or propionyl group, D glycine or D alanine, cyclodexylalanine at amino terminus
  MISC_FEATURE (2)..(2): X is A and G
  MISC_FEATURE (3)..(3): X is N or Q for amidated amino terminus
  MISC_FEATURE (4)..(4): X is F, W or Y for aromatic amino acids
  MISC_FEATURE (5)..(5): X is K, R or H for basic amino acids
  MISC_FEATURE (6)..(6): X is F, W or Y for aromatic amino acids
  MISC_FEATURE (7)..(7): X is A and G
  MISC_FEATURE (8)..(8): X is F or P
  MISC_FEATURE (9)..(9): X is K, R or H for basic amino acids
  MISC_FEATURE (10)..(10): X is K, R or H for basic amino acids
  MISC_FEATURE (11)..(11): X is F or P
  MISC_FEATURE (12)..(12): X is I, L or V
  MISC_FEATURE (13)..(13): X is K, R or H for basic amino acids
  MISC_FEATURE (14)..(14): X is A and G
  MISC_FEATURE (15)..(15): X is GabaX for X2X3 or X3X2 or X2X3 or X3X2 or X3X3 or X2X2
  MISC_FEATURE (16)..(16): X is A and G
  MISC_FEATURE (17)..(17): X is D and E for acidic amino acids
  MISC_FEATURE (18)..(18): X is D and E for acidic amino acids
  MISC_FEATURE (19)..(19): X is I, L or V
XXXXXXXXXXXXXXXXXXX

SEQ ID NO: 570 - protein, 17 aa, Artificial
  Completely synthesized peptide construct
  MISC_FEATURE (1)..(1): X is acetyl or propionyl group, D glycine or Dalanine, cyclohexylalanine at amino terminus
  MISC_FEATURE (2)..(2): X is A and G
  MISC_FEATURE (3)..(3): X is N or Q for amidated amino acids
  MISC_FEATURE (4)..(4): X is F, W or Y for aromatic amino acids
  MISC_FEATURE (5)..(5): X is K, R or H for basic amino acids
  MISC_FEATURE (6)..(6): X is GabaX for X2X3 or X3X2 or X2X3 or X3X2 or X3X3 or X2X2
  MISC_FEATURE (7)..(7): X is A and G
  MISC_FEATURE (8)..(8): X is F or P
  MISC_FEATURE (9)..(9): X is K, R or H for basic amino acids
  MISC_FEATURE (10)..(10): X is F or P
  MISC_FEATURE (11)..(11): X is I, L or V
  MISC_FEATURE (12)..(12): X is K, R or H for basic amino acids
  MISC_FEATURE (13)..(13): X is K, R or H for basic amino acids
  MISC_FEATURE (14)..(14): X is A and G
  MISC_FEATURE (15)..(15): X is GabaX for X2X3 or X3X2 or X2X3 or X3X2 or X3X3 or X2X2
  MISC_FEATURE (16)..(16): X is A and G
  MISC_FEATURE (17)..(17): X is GabaX for X2X3 or X3X2 or X2X3 or X3X2 or X3X3 or X2X2
XXXXXXXXXXXXXXXXX

SEQ ID NO: 571 - protein, 18 aa, Artificial
  Completely synthesized peptide construct
  MISC_FEATURE (1)..(1): X is acetyl or propionyl group, D glycine or D alanine, cyclodexylalanine at amino terminus
  MISC_FEATURE (2)..(2): X is A and G
  MISC_FEATURE (3)..(3): X is N or Q for amidated amino acids
  MISC_FEATURE (4)..(4): X is F, W or Y for aromatic amino acids
  MISC_FEATURE (5)..(5): X is K, R or H for basic amino acids
  MISC_FEATURE (6)..(6): X is GabaX for X2X3 or X3X2 or X2X3 or X3X2 or X3X3 or X2X2
  MISC_FEATURE (7)..(7): X is A and G
  MISC_FEATURE (8)..(8): X is F or P
  MISC_FEATURE (9)..(9): X is K, R or H for basic amino acids
  MISC_FEATURE (10)..(10): X is K, R or H for basic amino acids
  MISC_FEATURE (11)..(11): X is F or P
  MISC_FEATURE (12)..(12): X is I, L or V
  MISC_FEATURE (13)..(13): X is K, R or H for basic amino acids
  MISC_FEATURE (14)..(14): X is A and G
  MISC_FEATURE (15)..(15): X is I, L or V
  MISC_FEATURE (16)..(16): X is I, L or V
  MISC_FEATURE (17)..(17): X is A and G
  MISC_FEATURE (18)..(18): X is GabaX for X2X3 or X3X2 or X2X3 or X3X2 or X3X3 or X2X2
XXXXXXXXXXXXXXXXXX

SEQ ID NO: 572 - protein, 20 aa, Homo sapiens
NATGMEVGWYRPPFSRVVHL

SEQ ID NO: 573 - protein, 20 aa, Artificial
  Completely synthesized peptide construct
  MISC_FEATURE (1)..(1): X is N or Q for amidated amino acids
  MISC_FEATURE (2)..(2): X is A and G
  MISC_FEATURE (3)..(3): X is T or S
  MISC_FEATURE (4)..(4): X is A and G
  MISC_FEATURE (5)..(5): X is M or Nle (Norleucine)
  MISC_FEATURE (6)..(6): X is D and E for acidic amino acids
  MISC_FEATURE (7)..(7): X is I, L or V
  MISC_FEATURE (8)..(8): X is A and G
  MISC_FEATURE (9)..(9): X is F, W or Y for aromatic amino acids
  MISC_FEATURE (10)..(10): X is F, W or Y for aromatic amino acids
  MISC_FEATURE (11)..(11): X is K, R or H for basic amino acids
  MISC_FEATURE (12)..(12): X is F or P
  MISC_FEATURE (13)..(13): X is F or P
  MISC_FEATURE (14)..(14): X is F or P
  MISC_FEATURE (15)..(15): X is T or S
  MISC_FEATURE (16)..(16): X is K, R or H for basic amino acids
  MISC_FEATURE (17)..(17): X is I, L or V
  MISC_FEATURE (18)..(18): X is I, L or V
  MISC_FEATURE (19)..(19): X is K, R or H for basic amino acids
  MISC_FEATURE (20)..(20): X is I, L or V
XXXXXXXXXXXXXXXXXXXX

SEQ ID NO: 574 - protein, 19 aa, Artificial
  Completely synthesized peptide construct
  MISC_FEATURE (1)..(1): X is N or Q for amidated amino acids
  MISC_FEATURE (2)..(2): X is A and G
  MISC_FEATURE (3)..(3): X is T or S
  MISC_FEATURE (4)..(4): X is A and G
  MISC_FEATURE (5)..(5): X is M or Nle (Norleucine)
  MISC_FEATURE (6)..(6): X is GabaX for X2X3 or X3X2 or X2X3 or X3X2 or X3X3 or X2X2
  MISC_FEATURE (7)..(7): X is A and G
  MISC_FEATURE (8)..(8): X is F, W or Y for aromatic amino acids
  MISC_FEATURE (9)..(9): X is F, W or Y for aromatic amino acids
  MISC_FEATURE (10)..(10): X is K, R or H for basic amino acids
  MISC_FEATURE (11)..(11): X is F or P
  MISC_FEATURE (12)..(12): X is F or P
  MISC_FEATURE (13)..(13): X is F or P
  MISC_FEATURE (14)..(14): X is T or S
  MISC_FEATURE (15)..(15): X is K, R or H for basic amino acids
  MISC_FEATURE (16)..(16): X is I, L or V
  MISC_FEATURE (17)..(17): X is I, L or V
  MISC_FEATURE (18)..(18): X is K, R or H for basic amino acids
  MISC_FEATURE (19)..(19): X is I, L or V
XXXXXXXXXXXXXXXXXXX

SEQ ID NO: 575 - protein, 19 aa, Artificial
  Completely synthesized peptide construct
  MISC_FEATURE (1)..(1): X is N or Q for amidated amino acids
  MISC_FEATURE (2)..(2): X is A and G
  MISC_FEATURE (3)..(3): X is T or S
  MISC_FEATURE (4)..(4): X is A and G
  MISC_FEATURE (5)..(5): X is M or Nle (Norleucine)
  MISC_FEATURE (6)..(6): X is D and E for acidic amino acids
  MISC_FEATURE (7)..(7): X is I, L or V
  MISC_FEATURE (8)..(8): X is A and G
  MISC_FEATURE (9)..(9): X is F, W or Y for aromatic amino acids
  MISC_FEATURE (10)..(10): X is F, W or Y for aromatic amino acids
  MISC_FEATURE (11)..(11): X is K, R or H for basic amino acids
  MISC_FEATURE (12)..(12): X is F or P
  MISC_FEATURE (13)..(13): X is F or P
  MISC_FEATURE (14)..(14): X is F or P
  MISC_FEATURE (15)..(15): X is T or S
  MISC_FEATURE (16)..(16): X is K, R or H for basic amino acids
  MISC_FEATURE (17)..(17): X is GabaX for X2X3 or X3X2 or X2X3 or X3X2 or X3X3 or X2X2
  MISC_FEATURE (18)..(18): X is K, R or H for basic amino acids
  MISC_FEATURE (19)..(19): X is I, L or V
XXXXXXXXXXXXXXXXXXX

SEQ ID NO: 576 - protein, 18 aa, Artificial
  Completely synthesized peptide construct
  MISC_FEATURE (1)..(1): X is N or Q for amidated amino acids
  MISC_FEATURE (2)..(2): X is A and G
  MISC_FEATURE (3)..(3): X is T or S
  MISC_FEATURE (4)..(4): X is A and G
  MISC_FEATURE (5)..(5): X is M or Nle (Norleucine)
  MISC_FEATURE (6)..(6): X is GabaX for X2X3 or X3X2 or X2X3 or X3X2 or X3X3 or X2X2
  MISC_FEATURE (7)..(7): X is A and G
  MISC_FEATURE (8)..(8): X is F, W or Y for aromatic amino acids
  MISC_FEATURE (9)..(9): X is F, W or Y for aromatic amino acids
  MISC_FEATURE (10)..(10): X is K, R or H for basic amino acids
  MISC_FEATURE (11)..(11): X is F or P
  MISC_FEATURE (12)..(12): X is F or P
  MISC_FEATURE (13)..(13): X is F or P
  MISC_FEATURE (14)..(14): X is T or S
  MISC_FEATURE (15)..(15): X is K, R or H for basic amino acids
  MISC_FEATURE (16)..(16): X is GabaX for X2X3 or X3X2 or X2X3 or X3X2 or X3X3 or X2X2
  MISC_FEATURE (17)..(17): X is K, R or H for basic amino acids
  MISC_FEATURE (18)..(18): X is D and E for acidic amino acids
XXXXXXXXXXXXXXXXXX

SEQ ID NO: 577 - protein, 21 aa, Artificial
  Completely synthesized peptide construct
  MISC_FEATURE (1)..(1): X is acetyl or propionyl group, D glycine or D alanine, cyclohexylalanine at amino terminus
  MISC_FEATURE (2)..(2): X is N or Q for amidated amino acids
  MISC_FEATURE (3)..(3): X is A and G
  MISC_FEATURE (4)..(4): X is T or S
  MISC_FEATURE (5)..(5): X is A and G
  MISC_FEATURE (6)..(6): X is M or Nle (Norleucine)
  MISC_FEATURE (7)..(7): X is D and E for acidic amino acids
  MISC_FEATURE (8)..(8): X is I, L or V
  MISC_FEATURE (9)..(9): X is A and G
  MISC_FEATURE (10)..(10): X is F, W or Y for aromatic amino acids
  MISC_FEATURE (11)..(11): X is F, W or Y for aromatic amino acids
  MISC_FEATURE (12)..(12): X is K, R or H for basic amino acids
  MISC_FEATURE (13)..(13): X is F or P
  MISC_FEATURE (14)..(14): X is F or P
  MISC_FEATURE (15)..(15): X is F or P
  MISC_FEATURE (16)..(16): X is T or S
  MISC_FEATURE (17)..(17): X is K, R or H for basic amino acids
  MISC_FEATURE (18)..(18): X is I, L or V
  MISC_FEATURE (19)..(19): X is I, L or V
  MISC_FEATURE (20)..(20): X is K, R or H for basic amino acids
  MISC_FEATURE (21)..(21): X is I, L or V
XXXXXXXXXXXXXXXXXXXXX

SEQ ID NO: 578 - protein, 20 aa, Artificial
  Completely synthesized peptide construct
  MISC_FEATURE (1)..(1): X is acetyl or propionyl group, D glycine or D alanine, cyclohexylalanine at amino terminus
  MISC_FEATURE (2)..(2): X is N or Q for amidated amino acids
  MISC_FEATURE (3)..(3): X is A and G
  MISC_FEATURE (4)..(4): X is T or S
  MISC_FEATURE (5)..(5): X is A and G
  MISC_FEATURE (6)..(6): X is M or Nle (Norleucine)
  MISC_FEATURE (7)..(7): X is GabaX for X2X3 or X3X2 or X2X3 or X3X2 or X3X3 or X2X2
  MISC_FEATURE (8)..(8): X is A and G
  MISC_FEATURE (9)..(9): X is F, W or Y for aromatic amino acids
  MISC_FEATURE (10)..(10): X is F, W or Y for aromatic amino acids
  MISC_FEATURE (11)..(11): X is K, R or H for basic amino acids
  MISC_FEATURE (12)..(12): X is F or P
  MISC_FEATURE (13)..(13): X is F or P
  MISC_FEATURE (14)..(14): X is F or P
  MISC_FEATURE (15)..(15): X is T or S
  MISC_FEATURE (16)..(16): X is K, R or H for basic amino acids
  MISC_FEATURE (17)..(17): X is I, L or V
  MISC_FEATURE (18)..(18): X is I, L or V
  MISC_FEATURE (19)..(19): X is K, R or H for basic amino acids
  MISC_FEATURE (20)..(20): X is I, L or V
XXXXXXXXXXXXXXXXXXXX

SEQ ID NO: 579 - protein, 20 aa, Artificial
  Completely synthesized peptide construct
  MISC_FEATURE (1)..(1): X is acetyl or propionyl group, D glycine or D alanine, cyclohexylalanine at amino terminus
  MISC_FEATURE (2)..(2): X is N or Q for amidated amino acids
  MISC_FEATURE (3)..(3): X is A and G
  MISC_FEATURE (4)..(4): X is T or S
  MISC_FEATURE (5)..(5): X is A and G
  MISC_FEATURE (6)..(6): X is M or Nle (Norleucine)
  MISC_FEATURE (7)..(7): X is D and E for acidic amino acids
  MISC_FEATURE (8)..(8): X is I, L or V
  MISC_FEATURE (9)..(9): X is A and G
  MISC_FEATURE (10)..(10): X is F, W or Y for aromatic amino acids
  MISC_FEATURE (11)..(11): X is F, W or Y for aromatic amino acids
  MISC_FEATURE (12)..(12): X is K, R or H for basic amino acids
  MISC_FEATURE (13)..(13): X is F or P
  MISC_FEATURE (14)..(14): X is F or P
  MISC_FEATURE (15)..(15): X is F or P
  misc_feature (16)..(16): Xaa can be any naturally occurring amino acid
  MISC_FEATURE (17)..(17): X is K, R or H for basic amino acids
  MISC_FEATURE (18)..(18): X is GabaX for X2X3 or X3X2 or X2X3 or X3X2 or X3X3 or X2X2
  MISC_FEATURE (19)..(19): X is K, R or H for basic amino acids
  MISC_FEATURE (20)..(20): X is I, l or V
XXXXXXXXXXXXXXXXXXXX

SEQ ID NO: 580 - protein, 19 aa, Artificial
  Completely synthesized peptide construct
  MISC_FEATURE (1)..(1): X is acetyl or propionyl group, D glycine or D alanine, cyclohexylalanine at amino terminus
  MISC_FEATURE (2)..(2): X is N or Q for amidated amino acids
  MISC_FEATURE (3)..(3): X is A and G
  MISC_FEATURE (4)..(4): X is T or S
  MISC_FEATURE (5)..(5): X is A and G
  MISC_FEATURE (6)..(6): X is M or Nle (Norleucine)
  MISC_FEATURE (7)..(7): X is GabaX for X2X3 or X3X3 or X2X3 or X3X2 or X3X3 or X2X2
  MISC_FEATURE (8)..(8): X is A and G
  MISC_FEATURE (9)..(9): X is F, W or Y for aromatic amino acids
  MISC_FEATURE (10)..(10): X is F, W or Y for aromatic amino acids
  MISC_FEATURE (11)..(11): X is F, W or Y for aromatic amino acids
  MISC_FEATURE (11)..(11): X is K, R or H for basic amino acids
  MISC_FEATURE (12)..(12): X is F or P
  MISC_FEATURE (13)..(13): X is F or P
  MISC_FEATURE (14)..(14): X is F or P
  MISC_FEATURE (15)..(15): X is T or S
  MISC_FEATURE (16)..(16): X is K, R or H for basic amino acids
  MISC_FEATURE (17)..(17): X is GabaX for X2X3 or X3X2 or X2X3 or X3X2 or X3X3 or X2X2
  MISC_FEATURE (18)..(18): X is K, R or H for basic amino acids
  MISC_FEATURE (19)..(19): X is I, L or V
XXXXXXXXXXXXXXXXXXX

SEQ ID NO: 581 - protein, 20 aa, Homo sapiens
QAPEYRGRTELLKDAIGEGK

SEQ ID NO: 582 - protein, 20 aa, Artificial
  Completely synthesized peptide construct
  MISC_FEATURE (1)..(1): X is N or Q for amidated amino acids
  MISC_FEATURE (2)..(2): X is A and G
  MISC_FEATURE (3)..(3): X is F or P
  MISC_FEATURE (4)..(4): X is D and E for acidic amino acids
  MISC_FEATURE (5)..(5): X is F, W or Y for aromatic amino acids
  MISC_FEATURE (6)..(6): X is K, R or H for basic amino acids
  MISC_FEATURE (7)..(7): X is A and G
  MISC_FEATURE (8)..(8): X is K, R or H for basic amino acids
  MISC_FEATURE (9)..(9): X is T or S
  MISC_FEATURE (10)..(10): X is D and E for acidic amino acids
  MISC_FEATURE (11)..(11): X is I, L or V
  MISC_FEATURE (12)..(12): X is I, L or V
  MISC_FEATURE (13)..(13): X is K, R or H for basic amino acids
  MISC_FEATURE (14)..(14): X is D and E for acidic amino acids
  MISC_FEATURE (15)..(15): X is A and G
  MISC_FEATURE (16)..(16): X is I, L or V
  MISC_FEATURE (17)..(17): X is A and G
  MISC_FEATURE (18)..(18): X is D and E for acidic amino acids
  MISC_FEATURE (19)..(19): X is A and G
  MISC_FEATURE (20)..(20): X is K, R or H for basic amino acids
XXXXXXXXXXXXXXXXXXXX

SEQ ID NO: 583 - protein, 19 aa, Artificial
  Completely synthesized peptide construct
  MISC_FEATURE (1)..(1): X is N or Q for amidated amino acids
  MISC_FEATURE (2)..(2): X is A and G
  MISC_FEATURE (3)..(3): X is F or P
  MISC_FEATURE (4)..(4): X is D and E for acidic amino acids
  MISC_FEATURE (5)..(5): X is F, W or Y for aromatic amino acids
  MISC_FEATURE (6)..(6): X is K, R or H for basic amino acids
  MISC_FEATURE (7)..(7): X is A and G
  MISC_FEATURE (8)..(8): X is K, R or H for basic amino acids
  MISC_FEATURE (9)..(9): X is T or S
  MISC_FEATURE (10)..(10): X is GabaX for X2X3 or X3X2 or X2X3 orX3X2 or X3X3 or X2X2
  MISC_FEATURE (11)..(11): X is I, L or V
  MISC_FEATURE (12)..(12): X is K, R or H for basic amino acids
  MISC_FEATURE (13)..(13): X is D and E for acidic amino acids
  MISC_FEATURE (14)..(14): X is A and G
  MISC_FEATURE (15)..(15): X is I, L or V
  MISC_FEATURE (16)..(16): X is A and G
  MISC_FEATURE (17)..(17): X is D and E for acidic amino acids
  MISC_FEATURE (18)..(18): X is A and G
  MISC_FEATURE (19)..(19): X is K, R or H for basic amino acids
XXXXXXXXXXXXXXXXXXX

SEQ ID NO: 584 - protein, 18 aa, Artificial
  Completely synthesized peptide construct
  MISC_FEATURE (1)..(1): X is N or Q for amidated amino acids
  MISC_FEATURE (2)..(2): X is A and G
  MISC_FEATURE (3)..(3): X is F or P
  MISC_FEATURE (4)..(4): X is D and E for acidic amino acids
  MISC_FEATURE (5)..(5): X is F, W or Y for aromatic amino acids
  MISC_FEATURE (6)..(6): X is K, R or H for basic amino acids
  MISC_FEATURE (7)..(7): X is A and G
  MISC_FEATURE (8)..(8): X is K, R or H for basic amino acids
  MISC_FEATURE (9)..(9): X is T or S
  MISC_FEATURE (10)..(10): X is 5-aminopentanoic acid for replacement of 3 or 4 amino acids of X2 and X3
  MISC_FEATURE (11)..(11): X is K, R or H for basic amino acids
  MISC_FEATURE (12)..(12): X is D and E for acidic amino acids
  MISC_FEATURE (13)..(13): X is A and G
  MISC_FEATURE (14)..(14): X is I, L or V
  MISC_FEATURE (15)..(15): X is A and G
  MISC_FEATURE (16)..(16): X is A and G
  MISC_FEATURE (16)..(16): X is D and E for acidic amino acids
  MISC_FEATURE (17)..(17): X is A and G
  MISC_FEATURE (18)..(18): X is K, R or H for basic amino acids
XXXXXXXXXXXXXXXXXX

SEQ ID NO: 585 - protein, 21 aa, Artificial
  Completely synthesized peptide construct
  MISC_FEATURE (1)..(1): X is acetyl or propionyl group, D glycine or D alanine, cyclohexylalanine at amino terminus
  MISC_FEATURE (2)..(2): X is N or Q for amidated amino acids
  MISC_FEATURE (3)..(3): X is A and G
  MISC_FEATURE (4)..(4): X is F or P
  MISC_FEATURE (5)..(5): X is D and E for acidic amino acids
  MISC_FEATURE (6)..(6): X is F, W or Y for aromatic amino acids
  MISC_FEATURE (7)..(7): X is K, R or H for basic amino acids
  MISC_FEATURE (8)..(8): X is A and G
  MISC_FEATURE (9)..(9): X is K, R or H for basic amino acids
  MISC_FEATURE (10)..(10): X is T or S
  MISC_FEATURE (11)..(11): X is D and E for acidic amino acids
  MISC_FEATURE (12)..(12): X is I, L or V
  MISC_FEATURE (13)..(13): X is I, L or V
  MISC_FEATURE (14)..(14): X is K, R or H for basic amino acids
  MISC_FEATURE (15)..(15): X is D and E for acidic amino acids
  MISC_FEATURE (16)..(16): X is A and G
  MISC_FEATURE (17)..(17): X is I, L or V
  MISC_FEATURE (18)..(18): X is A and G
  MISC_FEATURE (19)..(19): X is D and E for acidic amino acids
  MISC_FEATURE (20)..(20): X is A and G
  MISC_FEATURE (21)..(21): X is K, R or H for basic amino acids
XXXXXXXXXXXXXXXXXXXXX

SEQ ID NO: 586 - protein, 20 aa, Artificial
  Completely synthesized peptide construct
  MISC_FEATURE (1)..(1): X is acetyl or propionyl group, D glycine or D alanine, cyclohexylalanine at amino terminus
  MISC_FEATURE (2)..(2): X is N or Q for amidated amino acids
  MISC_FEATURE (3)..(3): X is A and G
  MISC_FEATURE (4)..(4): X is F or P
  MISC_FEATURE (5)..(5): X is D and E for acidic amino acids
  MISC_FEATURE (6)..(6): X is F, W or Y for aromatic amino acids
  MISC_FEATURE (7)..(7): X is K, R or H for basic amino acids
  MISC_FEATURE (8)..(8): X is A and G
  MISC_FEATURE (9)..(9): X is K, R or H for basic amino acids
  MISC_FEATURE (10)..(10): X is T or S
  MISC_FEATURE (11)..(11): X is GabaX for X2X3 or X3X2 or X2X3 or X3X2 or X3X3 or X2X2
  MISC_FEATURE (12)..(12): X is  I, L or V
  MISC_FEATURE (13)..(13): X is K, R or H for basic amino acids
  MISC_FEATURE (14)..(14): X is D and E for acidic amino acids
  MISC_FEATURE (15)..(15): X is A and G
  MISC_FEATURE (16)..(16): X is I, L or V
  MISC_FEATURE (17)..(17): X is A and G
  MISC_FEATURE (18)..(18): X is D and E for acidic amino acids
  MISC_FEATURE (19)..(19): X is A and G
  MISC_FEATURE (20)..(20): X is K, R or H for basic amino acids
XXXXXXXXXXXXXXXXXXXX

SEQ ID NO: 587 - protein, 19 aa, Artificial
  Completely synthesized peptide construct
  MISC_FEATURE (1)..(1): X is acetyl or propionyl group, D glycine or D alanine, cyclohexylalanine at amino terminus
  MISC_FEATURE (2)..(2): X is N or Q for amidated amino acids
  MISC_FEATURE (3)..(3): X is A and G
  MISC_FEATURE (4)..(4): X is F or P
  MISC_FEATURE (5)..(5): X is D and E for acidic amino acids
  MISC_FEATURE (6)..(6): X is F, W or Y for aromatic amino acids
  MISC_FEATURE (7)..(7): X is K, R or H for basic amino acids
  MISC_FEATURE (8)..(8): X is A and G
  MISC_FEATURE (9)..(9): X is K, R or H for basic amino acids
  MISC_FEATURE (10)..(10): X is T or S
  MISC_FEATURE (11)..(11): X is 5-aminopentanoic acid for replacement of 3 or 4 amino acids of X2and X3
  MISC_FEATURE (12)..(12): X is K, R or H for basic amino acids
  MISC_FEATURE (13)..(13): X is D and E for acidic amino acids
  MISC_FEATURE (14)..(14): X is A and G
  MISC_FEATURE (15)..(15): X is I, L or V
  MISC_FEATURE (16)..(16): X is A and G
  MISC_FEATURE (17)..(17): X is D and E for acidic amino acids
  MISC_FEATURE (18)..(18): X is A and G
  MISC_FEATURE (19)..(19): X is K, R or H for basic amino acids
XXXXXXXXXXXXXXXXXXX

SEQ ID NO: 588 - protein, 20 aa, Homo sapiens
SDEGGFTCFFRDHSYQEEAA

SEQ ID NO: 589 - protein, 20 aa, Artificial
  Completely synthesized peptide construct
  MISC_FEATURE (1)..(1): X is T or S
  MISC_FEATURE (2)..(2): X is D and E for acidic amino acids
  MISC_FEATURE (3)..(3): X is A and G
  MISC_FEATURE (4)..(4): X is A and G
  MISC_FEATURE (5)..(5): X is A and G
  MISC_FEATURE (6)..(6): X is T or S
  MISC_FEATURE (7)..(7): X is T or S
  MISC_FEATURE (8)..(8): X is C or S
  MISC_FEATURE (9)..(9): X is F or P
  MISC_FEATURE (10)..(10): X is F or P
  MISC_FEATURE (11)..(11): X is K, R or H for basic amino acids
  MISC_FEATURE (12)..(12): X is D and E for acidic amino acids
  MISC_FEATURE (13)..(13): X is K, R or H for basic amino acids
  MISC_FEATURE (14)..(14): X is T or S
  MISC_FEATURE (15)..(15): X is F, W or Y for aromatic amino acids
  MISC_FEATURE (16)..(16): X is N or Q for amidated amino acids
  MISC_FEATURE (17)..(17): X is D and E for acidic amino acids
  MISC_FEATURE (18)..(18): X is D and E for acidic amino acids
  MISC_FEATURE (19)..(19): X is A and G
  MISC_FEATURE (20)..(20): X is A and G
XXXXXXXXXXXXXXXXXXXX

SEQ ID NO: 590 - protein, 19 aa, Artificial
  Completely synthesized peptide construct
  MISC_FEATURE (1)..(1): X is T or S
  MISC_FEATURE (2)..(2): X is GabaX for X2X3 or X3X2 or X2X3 or X3X2 or X3X3 or X2X2
  MISC_FEATURE (3)..(3): X is A and G
  MISC_FEATURE (4)..(4): X is A and G
  MISC_FEATURE (5)..(5): X is F or P
  MISC_FEATURE (6)..(6): X is T or S
  MISC_FEATURE (7)..(6): X is C or S
  misc_feature (7)..(7): Xaa can be any naturally occurring amino acid
  MISC_FEATURE (8)..(8): X is F or P
  MISC_FEATURE (9)..(9): X is F or P
  MISC_FEATURE (10)..(10): X is K, R or H for basic amino acids
  MISC_FEATURE (11)..(11): X is D and E for acidic amino acids
  MISC_FEATURE (12)..(12): X is K, R or H for basic amino acids
  MISC_FEATURE (13)..(13): X is T or S
  MISC_FEATURE (14)..(14): X is F, W for Y for aromatic amino acids
  MISC_FEATURE (15)..(15): X is N or Q for amidated amino acids
  MISC_FEATURE (16)..(16): X is D and E for acidic amino acids
  MISC_FEATURE (17)..(17): X is D and E for acidic amino acids
  MISC_FEATURE (18)..(18): X is A and G
  MISC_FEATURE (19)..(19): X is A and G
XXXXXXXXXXXXXXXXXXX

SEQ ID NO: 591 - protein, 19 aa, Artificial
  Completely synthesized peptide construct
  MISC_FEATURE (1)..(1): X is T or S
  MISC_FEATURE (2)..(2): X is D and E for acidic amino acids
  MISC_FEATURE (3)..(3): X is D and E for acidic amino acids
  MISC_FEATURE (4)..(4): X is A and G
  MISC_FEATURE (5)..(5): X is A and G
  MISC_FEATURE (6)..(6): X is F or P
  MISC_FEATURE (7)..(7): X is T or S
  MISC_FEATURE (8)..(8): X is C or S
  MISC_FEATURE (9)..(9): X is F or P
  MISC_FEATURE (10)..(10): X is F or P
  MISC_FEATURE (11)..(11): X is K, R or H for basic amino acids
  MISC_FEATURE (12)..(12): X is D and E for acidic amino acids
  MISC_FEATURE (13)..(13): X is K, R or H for basic amino acids
  MISC_FEATURE (14)..(14): X is T or S
  MISC_FEATURE (15)..(15): X is F, W or Y for aromatic amino acids
  MISC_FEATURE (16)..(16): X is N or Q for amidated amino acids
  MISC_FEATURE (17)..(17): X is GabaX for X2X3 or X3X2 or X2X3 or X3X2 or X3X3 or X2X2
  MISC_FEATURE (18)..(18): X is A and G
  MISC_FEATURE (19)..(19): X is A and G
XXXXXXXXXXXXXXXXXXX

SEQ ID NO: 592 - protein, 18 aa, Artificial
  Completely synthesized peptide construct
  MISC_FEATURE (1)..(1): X is T or S
  MISC_FEATURE (2)..(2): X is GabaX for X2X3 or X3X2 or X2X3 or X3X2 or X3X3 or X2X2
  MISC_FEATURE (3)..(3): X is A and G
  MISC_FEATURE (4)..(4): X is A and G
  MISC_FEATURE (5)..(5): X is F or P
  MISC_FEATURE (6)..(6): X is T or S
  MISC_FEATURE (7)..(7): X is C or S
  MISC_FEATURE (8)..(8): X is F or P
  MISC_FEATURE (9)..(9): X is F or P
  MISC_FEATURE (10)..(10): X is K, R or H for basic amino acids
  MISC_FEATURE (11)..(11): X is D and E for acidic amino acids
  MISC_FEATURE (12)..(12): X is K, R or H for basic amino acids
  MISC_FEATURE (13)..(13): X is T or S
  MISC_FEATURE (14)..(14): X is F, W or Y for aromatic amino acids
  MISC_FEATURE (15)..(15): X is N or Q for amidated amino acids
  MISC_FEATURE (16)..(16): X is GabaX for X2X3 or X3X2 or X2X3 or X3X2 or X3X3 or X2X2
  MISC_FEATURE (17)..(17): X is A and G
  MISC_FEATURE (18)..(18): X is A and G
XXXXXXXXXXXXXXXXXX

SEQ ID NO: 593 - protein, 21 aa, Artificial
  Completely synthesized peptide construct
  MISC_FEATURE (1)..(1): X is acetyl or propionyl group, D glycine or D alanine, cyclohexylalanine at amino terminus
  MISC_FEATURE (2)..(2): X is T or S
  MISC_FEATURE (3)..(3): X is D and E for acidic amino acids
  MISC_FEATURE (4)..(4): X is D and E for acidic amino acids
  MISC_FEATURE (5)..(5): X is A and G
  MISC_FEATURE (6)..(6): X is A and G
  MISC_FEATURE (7)..(7): X is F or P
  MISC_FEATURE (8)..(8): X is T or S
  MISC_FEATURE (9)..(9): X is C or S
  MISC_FEATURE (10)..(10): X is F or P
  MISC_FEATURE (11)..(11): X is F or P
  MISC_FEATURE (12)..(12): X is K, R or H for basic amino acids
  MISC_FEATURE (13)..(13): X is D and E for acidic amino acids
  MISC_FEATURE (14)..(14): X is K, R or H for basic amino acids
  MISC_FEATURE (15)..(15): X is T or S
  MISC_FEATURE (16)..(16): X is F, W or Y for aromatic amino acids
  MISC_FEATURE (17)..(17): X is N or Q for amidated amino acids
  MISC_FEATURE (18)..(18): X is D and E for acidic amino acids
  MISC_FEATURE (19)..(19): X is D and E for acidic amino acids
  MISC_FEATURE (20)..(20): X is A and G
  MISC_FEATURE (21)..(21): X is A and G
XXXXXXXXXXXXXXXXXXXXX

SEQ ID NO: 594 - protein, 20 aa, Artificial
  Completely synthesized peptide construct
  MISC_FEATURE (1)..(1): X is acetyl or propionyl group, D glycine or D alanine, cyclohexylalanine at amino terminus
  MISC_FEATURE (2)..(2): X is T or S
  MISC_FEATURE (3)..(3): X is GabaX for X2X3 or X3X2 or X2X3 or X3X2 or X3X3 or X2X2
  MISC_FEATURE (4)..(4): X is A and G
  MISC_FEATURE (5)..(5): X is A and G
  MISC_FEATURE (6)..(6): X is F or P
  MISC_FEATURE (7)..(7): X is T or S
  MISC_FEATURE (8)..(8): X is C or S
  MISC_FEATURE (9)..(9): X is F or P
  MISC_FEATURE (10)..(10): X is F or P
  MISC_FEATURE (11)..(11): X is K, R or H for basic amino acids
  MISC_FEATURE (12)..(12): X is D and E for acidic amino acids
  MISC_FEATURE (13)..(13): X is K, R or H for basic amino acids
  MISC_FEATURE (14)..(14): X is T or S
  MISC_FEATURE (15)..(15): X is F, W or Y for aromatic amino acids
  MISC_FEATURE (16)..(16): X is N or Q for amidated amino acids
  MISC_FEATURE (17)..(17): X is D and E for acidic amino acids
  MISC_FEATURE (18)..(18): X is D and E for acidic amino acids
  MISC_FEATURE (19)..(19): X is A and G
  MISC_FEATURE (20)..(20): X is A and G
XXXXXXXXXXXXXXXXXXXX

SEQ ID NO: 595 - protein, 20 aa, Artificial
  Completely synthesized peptide construct
  MISC_FEATURE (1)..(1): X is acetyl or propionyl group, D glycine or D alanine, cyclohexylalanine at amino terminus
  MISC_FEATURE (2)..(2): X is T or S
  MISC_FEATURE (3)..(3): X is D and E for acidic amino acids
  MISC_FEATURE (4)..(4): X is D and E for acidic amino acids
  MISC_FEATURE (5)..(5): X is A and G
  MISC_FEATURE (6)..(6): X is A and G
  MISC_FEATURE (7)..(7): X is F or P
  MISC_FEATURE (8)..(8): X is T or S
  MISC_FEATURE (9)..(9): X is C or S
  MISC_FEATURE (10)..(10): X is F or P
  MISC_FEATURE (11)..(11): X is F or P
  MISC_FEATURE (12)..(12): X is K, R or H for basic amino acids
  MISC_FEATURE (13)..(13): X is D and E for acidic amino acids
  MISC_FEATURE (14)..(14): X is K, R or H for basic amino acids
  MISC_FEATURE (15)..(15): X is T or S
  MISC_FEATURE (16)..(16): X is F, W or Y for aromatic amino acids
  MISC_FEATURE (17)..(17): X is N or Q for amidated amino acids
  MISC_FEATURE (18)..(18): X is GabaX for X2X3 or X3X2 or X2X3 or X3X2 or X3X3 or X2X2
  MISC_FEATURE (19)..(19): X is A and G
  MISC_FEATURE (20)..(20): X is A and G
XXXXXXXXXXXXXXXXXXXX

SEQ ID NO: 596 - protein, 19 aa, Artificial
  Completely synthesized peptide construct
  MISC_FEATURE (1)..(1): X is acetyl or propionyl group, D glycine or D alanine, cyclohexylalanine at amino terminus
  MISC_FEATURE (2)..(2): X is T or S
  MISC_FEATURE (3)..(3): X is GabaX for X2X3 or X3X2 or X2X3 or X3X2 or X3X3 or X2X2
  MISC_FEATURE (4)..(4): X is A and G
  MISC_FEATURE (5)..(5): X is A and G
  MISC_FEATURE (6)..(6): X is F or P
  MISC_FEATURE (7)..(7): X is T or S
  MISC_FEATURE (8)..(8): X is C or S
  MISC_FEATURE (9)..(9): X is F or P
  MISC_FEATURE (10)..(10): X is F or P
  MISC_FEATURE (11)..(11): X is K, R or H for basic amino acids
  MISC_FEATURE (12)..(12): X is D and E for acidic amino acids
  MISC_FEATURE (13)..(13): X is K, R or H for basic amino acids
  MISC_FEATURE (14)..(14): X is T or S
  MISC_FEATURE (15)..(15): X is F, W or Y for aromatic amino acids
  MISC_FEATURE (16)..(16): X is N or Q for amidated amino acids
  MISC_FEATURE (17)..(17): X is GabaX for X2X3 or X3X2 or X2X3 or X3X2 or X3X3 or X2X2
  MISC_FEATURE (18)..(18): X is A andG
  MISC_FEATURE (19)..(19): X is A andG
XXXXXXXXXXXXXXXXXXX

SEQ ID NO: 597 - protein, 15 aa, Homo sapiens
ENPVVHFFKNIVTPR

SEQ ID NO: 598 - protein, 15 aa, Artificial
  Completely synthesized peptide construct
  MISC_FEATURE (1)..(1): X is D and E for acidic amino acids
  MISC_FEATURE (2)..(2): X is N or Q for amidated amino acids
  MISC_FEATURE (3)..(3): X is F or P
  MISC_FEATURE (4)..(4): X is I, L or V
  MISC_FEATURE (5)..(5): X is I, L or V
  MISC_FEATURE (6)..(6): X is K, R or H for basic amino acids
  MISC_FEATURE (7)..(7): X is F, W or Y for aromatic amino acids
  MISC_FEATURE (8)..(8): X is F, W or Y for aromatic amino acids
  MISC_FEATURE (9)..(9): X is K, R or H for basic amino acids
  MISC_FEATURE (10)..(10): X is N or Q for amidated amino acids
  MISC_FEATURE (11)..(11): X is I, L or V
  MISC_FEATURE (12)..(12): X is I, L or V
  MISC_FEATURE (13)..(13): X is T or S
  MISC_FEATURE (14)..(14): X is F or P
  MISC_FEATURE (15)..(15): X is K, R or H for basic amino acids
XXXXXXXXXXXXXXX

SEQ ID NO: 599 - protein, 14 aa, Artificial
  Completely synthesized peptide construct
  MISC_FEATURE (1)..(1): X is D and E for acidic amino acids
  MISC_FEATURE (2)..(2): X is N or Q for amidated amino acids
  MISC_FEATURE (3)..(3): X is F or P
  MISC_FEATURE (4)..(4): X is GabaX for X2X3 or X3X2 or X2X3 or X3X2 or X3X3 or X2X2
  MISC_FEATURE (5)..(5): X is K, R or H for basic amino acids
  MISC_FEATURE (6)..(6): X is F, W or Y for aromatic amino acids
  MISC_FEATURE (7)..(7): X is F, W or Y for aromatic amino acids
  MISC_FEATURE (8)..(8): X is K, R or H for basic amino acids
  MISC_FEATURE (9)..(9): X is N or Q for amidated amino acids
  MISC_FEATURE (10)..(10): X is I, L or V
  MISC_FEATURE (11)..(11): X is I, L or V
  MISC_FEATURE (12)..(12): X is T or S
  MISC_FEATURE (13)..(13): X is F or P
  MISC_FEATURE (14)..(14): X is K, R or H for basic amino acids
XXXXXXXXXXXXXX

SEQ ID NO: 600 - protein, 14 aa, Artificial
  Completely synthesized peptide construct
  MISC_FEATURE (1)..(1): X is D and E for acidic amino acids
  MISC_FEATURE (2)..(2): X is N or Q for amidated amino acids
  MISC_FEATURE (3)..(3): X is F or P
  MISC_FEATURE (4)..(4): X is I, L or V
  MISC_FEATURE (5)..(5): X is I, L or V
  MISC_FEATURE (6)..(6): X is K, R or H for basic amino acids
  MISC_FEATURE (7)..(7): X is K, R or H for basic amino acids
  MISC_FEATURE (8)..(8): X is K, R or H for basic amino acids
  MISC_FEATURE (9)..(9): X is N or Q for amidated amino acids
  MISC_FEATURE (9)..(9): X is K, R or H for basic amino acids
  MISC_FEATURE (10)..(10): X is N or Q for amidated amino acids
  MISC_FEATURE (11)..(11): X is GabaX for X2X3 or X3X2 or X2X3 or X3X2 or X3X3 or X2X2
  MISC_FEATURE (12)..(12): X is T or S
  MISC_FEATURE (13)..(13): X is F or P
  MISC_FEATURE (14)..(14): X is K, R or H for basic amino acids
XXXXXXXXXXXXXX

SEQ ID NO: 601 - protein, 13 aa, Artificial
  Completely synthesized peptide construct
  MISC_FEATURE (1)..(1): X is D and E for acidic amino acids
  MISC_FEATURE (2)..(2): X is N or Q for amidated amino acids
  MISC_FEATURE (3)..(3): X is F or P
  MISC_FEATURE (4)..(4): X is GabaX for X2X3 or X3X2 or X2X3 or X3X2 or X3X3 or X2X2
  MISC_FEATURE (5)..(5): X is K, R or H for basic amino acids
  MISC_FEATURE (6)..(6): X is F, W or Y for aromatic amino acids
  MISC_FEATURE (7)..(7): X is F, W or Y for aromatic amino acids
  MISC_FEATURE (8)..(8): X is K, R or H for basic amino acids
  MISC_FEATURE (9)..(9): X is N or Q for amidated amino acids
  MISC_FEATURE (10)..(10): X is GabaX for X2X3 or X3X2 or X2X3 or X3X2 or X3X3 or X2X2
  MISC_FEATURE (11)..(11): X is T or S
  MISC_FEATURE (12)..(12): X is F or P
  MISC_FEATURE (13)..(13): X is K, R or H for basic amino acids
XXXXXXXXXXXXX

SEQ ID NO: 602 - protein, 16 aa, Artificial
  Completely synthesized peptide construct
  MISC_FEATURE (1)..(1): X is acetyl or propionyl group, D glycine or D alanine, cyclohexylalanine at amino terminus
  MISC_FEATURE (2)..(2): X is D and E for acidic amino acids
  MISC_FEATURE (3)..(3): X is N or Q for amidated amino acids
  MISC_FEATURE (4)..(4): X is F or P
  MISC_FEATURE (5)..(5): X is I, L or V
  MISC_FEATURE (6)..(6): X is I, L or V
  MISC_FEATURE (7)..(7): X is K, R or H for basic amino acids
  MISC_FEATURE (8)..(8): X is F, W or Y for aromatic amino acids
  MISC_FEATURE (9)..(9): X is F, W or Y for aromatic amino acids
  MISC_FEATURE (10)..(10): X is K, R or H for basic amino acids
  MISC_FEATURE (11)..(11): X is N or Q for amidated amino acids
  MISC_FEATURE (12)..(12): X is I, L or V
  MISC_FEATURE (13)..(13): X is I, L or V
  MISC_FEATURE (14)..(14): X is T or S
  MISC_FEATURE (15)..(15): X is F or P
  MISC_FEATURE (16)..(16): X is K, R or H for basic amino acids
XXXXXXXXXXXXXXXX

SEQ ID NO: 603 - protein, 15 aa, Artificial
  Completely synthesized peptide construct
  MISC_FEATURE (1)..(1): X is acetyl or propionyl group, D glycine or D alanine, cyclohexylalanine at amino terminus
  MISC_FEATURE (2)..(2): X is D and E for acidic amino acids
  MISC_FEATURE (3)..(3): X is N or Q for amidated amino acids
  MISC_FEATURE (4)..(4): X is F or P
  MISC_FEATURE (5)..(5): X is GabaX for X2X3 or X3X2 or X2X3 or X3X2 or X3X3 or X2X2
  MISC_FEATURE (6)..(6): X is K, R or H for basic amino acids
  MISC_FEATURE (7)..(7): X is F, W or Y for aromatic amino acids
  MISC_FEATURE (8)..(8): X is F, W or Y for aromatic amino acids
  MISC_FEATURE (9)..(9): X is K, R or H for basic amino acids
  MISC_FEATURE (10)..(10): X is N or Q for amidated amino acids
  MISC_FEATURE (11)..(11): X is I, L or V
  MISC_FEATURE (12)..(12): X is I, L or V
  MISC_FEATURE (13)..(13): X is T or S
  MISC_FEATURE (14)..(14): X is F or P
  MISC_FEATURE (15)..(15): X is K, R or H for basic amino acids
XXXXXXXXXXXXXXX

SEQ ID NO: 604 - protein, 15 aa, Artificial
  Completely synthesized peptide construct
  MISC_FEATURE (1)..(1): X is acetyl or propionyl group, D glycine or D alanine, cyclohexylalanine at amino terminus
  MISC_FEATURE (2)..(2): X is D and E for acidic amino acids
  MISC_FEATURE (3)..(3): X is N or Q for amidated amino acids
  MISC_FEATURE (4)..(4): X is F or P
  MISC_FEATURE (5)..(5): X is I, L or V
  MISC_FEATURE (6)..(6): X is I, L or V
  MISC_FEATURE (7)..(7): X is K, R or H for basic amino acids
  MISC_FEATURE (8)..(8): X is F, W or Y for aromatic amino acids
  MISC_FEATURE (9)..(9): X is F, W or Y for aromatic amino acids
  MISC_FEATURE (10)..(10): X is K, R or H for basic amino acids
  MISC_FEATURE (11)..(11): X is N or Q for amidated amino acids
  MISC_FEATURE (12)..(12): X is GabaX for X2X3 or X3X2 or X2X3 or X3X2 or X3X3 or X2X2
  MISC_FEATURE (13)..(13): X is T or S
  MISC_FEATURE (14)..(14): X is F or P
  MISC_FEATURE (15)..(15): X is K, R or H for basic amino acids
XXXXXXXXXXXXXXX

SEQ ID NO: 605 - protein, 14 aa, Artificial
  Completely synthesized peptide construct
  MISC_FEATURE (1)..(1): X is acetyl or propionyl group, D glycine or D alanine, cyclohexylalanine at amino terminus
  MISC_FEATURE (2)..(2): X is D and E for acidic amino acids
  MISC_FEATURE (3)..(3): X is N or Q for amidated amino acids
  MISC_FEATURE (4)..(4): X is F or P
  MISC_FEATURE (5)..(5): X is GabaX for X2X3 or X3X2 or X2X3 or X3X2 or X3X3 or X2X2
  MISC_FEATURE (6)..(6): X is K, R or H for basic amino acids
  MISC_FEATURE (7)..(7): X is F, W or Y for aromatic amino acids
  MISC_FEATURE (8)..(8): X is F, W or Y for aromatic amino acids
  MISC_FEATURE (9)..(9): X is K, R or H for basic amino acids
  MISC_FEATURE (10)..(10): X is N or Q for amidated amino acids
  MISC_FEATURE (11)..(11): X is GabaX for X2X3 or X3X2 or X2X3 or X3X2 or X3X3 or X2X2
  MISC_FEATURE (12)..(12): X is T or S
  MISC_FEATURE (13)..(13): X is F or P
  MISC_FEATURE (14)..(14): X is K, R or H for basic amino acids
XXXXXXXXXXXXXX

SEQ ID NO: 606 - protein, 16 aa, Homo sapiens
QSIAFPSKTSASIGSL

SEQ ID NO: 607 - protein, 16 aa, Artificial
  Completely synthesized peptide construct
  MISC_FEATURE (1)..(1): X is N or Q for amidated amino acids
  MISC_FEATURE (2)..(2): X is T or S
  MISC_FEATURE (3)..(3): X is I, L or V
  MISC_FEATURE (4)..(4): X is A and G
  MISC_FEATURE (5)..(5): X is GabaX for X2X3 or X3X2 or X2X3 or X3X2 or X3X3 or X2X2
  MISC_FEATURE (6)..(6): X is F or P
  MISC_FEATURE (7)..(7): X is T or S
  MISC_FEATURE (8)..(8): X is K, R or H for basic amino acids
  MISC_FEATURE (9)..(9): X is T or S
  MISC_FEATURE (10)..(10): X is T or S
  MISC_FEATURE (11)..(11): X is A and G
  MISC_FEATURE (12)..(12): X is T or S
  MISC_FEATURE (13)..(13): X is I, L or V
  MISC_FEATURE (14)..(14): X is A and G
  MISC_FEATURE (15)..(15): X is T or S
  MISC_FEATURE (16)..(16): X is I, L or V
XXXXXXXXXXXXXXXX

SEQ ID NO: 608 - protein, 17 aa, Artificial
  Completely synthesized peptide construct
  MISC_FEATURE (1)..(1): X is acetyl or propionyl group, D glycine or D alanine, cyclohexylalanine at amino terminus
  MISC_FEATURE (2)..(2): X is N or Q for amidated amino acids
  MISC_FEATURE (3)..(3): X is T or S
  MISC_FEATURE (4)..(4): X is I, L or V
  MISC_FEATURE (5)..(5): X is A and G
  MISC_FEATURE (6)..(6): X is F or P
  MISC_FEATURE (7)..(7): X is F or P
  MISC_FEATURE (8)..(8): X is T or S
  MISC_FEATURE (9)..(9): X is K, R or H for basic amino acids
  MISC_FEATURE (10)..(10): X is T or S
  MISC_FEATURE (11)..(11): X is T or S
  MISC_FEATURE (12)..(12): X is A and G
  MISC_FEATURE (13)..(13): X is T or S
  MISC_FEATURE (14)..(14): X is I, L or V
  MISC_FEATURE (15)..(15): X is A and G
  MISC_FEATURE (16)..(16): X is T or S
  MISC_FEATURE (17)..(17): X is I, L or V
XXXXXXXXXXXXXXXXX

SEQ ID NO: 609 - protein, 20 aa, Homo  sapiens
SKTSASIGSLCADARMYGVL

SEQ ID NO: 610 - protein, 19 aa, Artificial
  Completely synthesized peptide construct
  MISC_FEATURE (1)..(1): X is T or S
  MISC_FEATURE (2)..(2): X is K, R or H for basic amino acids
  MISC_FEATURE (3)..(3): X is T or S
  MISC_FEATURE (4)..(4): X is T or S
  MISC_FEATURE (5)..(5): X is A and G
  MISC_FEATURE (6)..(6): X is T or S
  MISC_FEATURE (7)..(7): X is I, L or V
  MISC_FEATURE (8)..(8): X is A and G
  MISC_FEATURE (9)..(9): X is T or S
  MISC_FEATURE (10)..(10): X is I, L or V
  MISC_FEATURE (11)..(11): X is C or S
  MISC_FEATURE (12)..(12): X is A and G
  MISC_FEATURE (13)..(13): X is D and E for acidic amino acids
  MISC_FEATURE (14)..(14): X is A and G
  MISC_FEATURE (15)..(15): X is K, R or H for basic amino acids
  MISC_FEATURE (16)..(16): X is M or Nle (Norleucine)
  MISC_FEATURE (17)..(17): X is F, W or Y for aromatic amino acids
  MISC_FEATURE (18)..(18): X is A and G
  MISC_FEATURE (19)..(19): X is I, L or V
XXXXXXXXXXXXXXXXXXX

SEQ ID NO: 611 - protein, 20 aa, Artificial
  Completely synthesized peptide construct
  MISC_FEATURE (1)..(1): X is acetyl or propionyl group, D glycine or D alanine, cyclohexylalanine at amino terminus
  MISC_FEATURE (2)..(2): X is T or S
  MISC_FEATURE (3)..(3): X is K, R or H for basic amino acids
  MISC_FEATURE (4)..(4): X is T or S
  MISC_FEATURE (5)..(5): X is T or S
  MISC_FEATURE (6)..(6): X is A and G
  MISC_FEATURE (7)..(7): X is T or S
  MISC_FEATURE (8)..(8): X is I, L or V
  MISC_FEATURE (9)..(9): X is A and G
  MISC_FEATURE (10)..(10): X is T or S
  MISC_FEATURE (11)..(11): X is I, L or V
  MISC_FEATURE (12)..(12): X is C or S
  MISC_FEATURE (13)..(13): X is A and G
  MISC_FEATURE (14)..(14): X is D and E for acidic amino acids
  MISC_FEATURE (15)..(15): X is A and G
  MISC_FEATURE (16)..(16): X is K, R or H for basic amino acids
  MISC_FEATURE (17)..(17): X is M or Nle (Norleucine)
  MISC_FEATURE (18)..(18): X is F, W or Y for aromatic amino acids
  MISC_FEATURE (19)..(19): X is A and G
  MISC_FEATURE (20)..(20): X is I, L or V
XXXXXXXXXXXXXXXXXXXX

SEQ ID NO: 612 - protein, 9 aa, Homo sapiens
FFRDHSYQE

SEQ ID NO: 613 - protein, 9 aa, Artificial
  Completely synthesized peptide construct
  MISC_FEATURE (1)..(1): X is F or P
  MISC_FEATURE (2)..(2): X is F or P
  MISC_FEATURE (3)..(3): X is K, R or H for basic amino acids
  MISC_FEATURE (4)..(4): X is D and E for acidic amino acids
  MISC_FEATURE (5)..(5): X is K, R or H for basic amino acids
  MISC_FEATURE (6)..(6): X is T or S
  MISC_FEATURE (7)..(7): X is F, W or Y for aromatic amino acids
  MISC_FEATURE (8)..(8): X is N or Q for amidated amino acids
  MISC_FEATURE (9)..(9): X is D and E for acidic amino acids
XXXXXXXXX

SEQ ID NO: 614 - protein, 10 aa, Artificial
  Completely synthesized peptide construct
  MISC_FEATURE (1)..(1): X is acetyl or propionyl group, D glycine or D alanine, cyclohexylalanine at amino terminus
  MISC_FEATURE (2)..(2): X is F or P
  MISC_FEATURE (3)..(3): X is F or P
  MISC_FEATURE (4)..(4): X is K, R or H for basic amino acids
  MISC_FEATURE (5)..(5): X is D and E for acidic amino acids
  MISC_FEATURE (6)..(6): X is K, R or H for basjc amino acids
  MISC_FEATURE (7)..(7): X is T or S
  MISC_FEATURE (8)..(8): X is F, W or Y for aromatic amino acids
  MISC_FEATURE (9)..(9): X is N or Q for amidated amino acids
  MISC_FEATURE (10)..(10): X is D and E for acidic amino acids
XXXXXXXXXX

SEQ ID NO: 615 - protein, 14 aa, Artificial
  Completely synthesized peptide construct
  MISC_FEATURE (1)..(1): X is D and E for acidic amino acids
  MISC_FEATURE (2)..(2): X is N or Q for amidated amino acids
  MISC_FEATURE (3)..(3): X is F or P
  MISC_FEATURE (4)..(4): X is I, L or V
  MISC_FEATURE (5)..(5): X is I, L or V
  MISC_FEATURE (6)..(6): X is K, R or H for basic amino acids
  MISC_FEATURE (7)..(7): X is F or P
  MISC_FEATURE (8)..(8): X is F or P
  MISC_FEATURE (9)..(9): X is K, R or H for basic amino acids
  MISC_FEATURE (10)..(10): X is N or Q for amidated amino acids
  MISC_FEATURE (11)..(11): X is I, L or V
  MISC_FEATURE (12)..(12): X is I, L or V
  MISC_FEATURE (13)..(13): X is T or S
  MISC_FEATURE (14)..(14): X is F or P
XXXXXXXXXXXXXX

SEQ ID NO: 616 - protein, 13 aa, Artificial
  Completely synthesized peptide construct
  MISC_FEATURE (1)..(1): X is D and E for acidic amino acids
  MISC_FEATURE (2)..(2): X is N or Q for amidated amino acids
  MISC_FEATURE (3)..(3): X is F or P
  MISC_FEATURE (4)..(4): X is GabaX for X2X3 or X3X2 or X2X3 or X3X2 or X3X3 or X2X2
  MISC_FEATURE (5)..(5): X is K, R or H for basic amino acids
  MISC_FEATURE (6)..(6): X is F or P
  MISC_FEATURE (7)..(7): X is F or P
  MISC_FEATURE (8)..(8): X is K, R or H for basic amino acids
  MISC_FEATURE (9)..(9): X is N or Q for amidated amino acids
  MISC_FEATURE (10)..(10): X is I, L or V
  MISC_FEATURE (11)..(11): X is I, L or V
  MISC_FEATURE (12)..(12): X is T or S
  MISC_FEATURE (13)..(13): X is F or P
XXXXXXXXXXXXX

SEQ ID NO: 617 - protein, 13 aa, Artificial
  Completely synthesized peptide construct
  MISC_FEATURE (1)..(1): X is D and E for acidic amino acids
  MISC_FEATURE (2)..(2): X is N or Q for amidated amino acids
  MISC_FEATURE (3)..(3): X is F or P
  MISC_FEATURE (4)..(4): X is I, L or V
  MISC_FEATURE (5)..(5): X is I, L or V
  MISC_FEATURE (6)..(6): X is K, R or H for basic amino acids
  MISC_FEATURE (7)..(7): X is F or P
  MISC_FEATURE (8)..(8): X is F or P
  MISC_FEATURE (9)..(9): X is K, R or H for basic amino acids
  MISC_FEATURE (10)..(10): X is N or Q for amidated amino acids
  MISC_FEATURE (11)..(11): X is GabaX for X2X3 or X3X2 or X2X3 or X3X2 or X3X3 or X2X2
  MISC_FEATURE (12)..(12): X is T or S
  MISC_FEATURE (13)..(13): X is F or P
XXXXXXXXXXXXX

SEQ ID NO: 618 - protein, 12 aa, Artificial
  Completely synthesized peptide construct
  MISC_FEATURE (1)..(1): X is D and E for acidic amino acids
  MISC_FEATURE (2)..(2): X is N or Q for amidated amino acids
  MISC_FEATURE (3)..(3): X is F or P
  MISC_FEATURE (4)..(4): X is GabaX for X2X3 or X3X2 or X2X3 or X3X2 or X3X3 or X2X2
  MISC_FEATURE (5)..(5): X is K, R or H for basic amino acids
  MISC_FEATURE (6)..(6): X is F or P
  MISC_FEATURE (7)..(7): X is F or P
  MISC_FEATURE (8)..(8): X is K, R or H for basic amino acids
  MISC_FEATURE (9)..(9): X is N or Q for amidated amino acids
  MISC_FEATURE (10)..(10): X is GabaX for X2X3 or X3X2 or X2X3 or X3X2 or X3X3 or X2X2
  MISC_FEATURE (11)..(11): X is T or S
  MISC_FEATURE (12)..(12): X is F or P
XXXXXXXXXXXX

SEQ ID NO: 619 - protein, 15 aa, Artificial
  Completely synthesized peptide construct
  MISC_FEATURE (1)..(1): X is acetyl or propionyl group, D glycine or D alanine, cyclohexylalanine at amino terminus
  MISC_FEATURE (2)..(2): X is D and E for acidic amino acids
  MISC_FEATURE (3)..(3): X is N or Q for amidated amino acids
  MISC_FEATURE (4)..(4): X is F or P
  MISC_FEATURE (5)..(5): X is I, L or V
  MISC_FEATURE (6)..(6): X is I, L or V
  MISC_FEATURE (7)..(7): X is K, R or H for basic amino acids
  MISC_FEATURE (8)..(8): X is F or P
  MISC_FEATURE (9)..(9): X is F or P
  MISC_FEATURE (10)..(10): X is K, R or H for basic amino acids
  MISC_FEATURE (11)..(11): X is N or Q for amidated amino acids
  MISC_FEATURE (12)..(12): X is I, L or V
  MISC_FEATURE (13)..(13): X is I, L or V
  MISC_FEATURE (14)..(14): X is T or S
  MISC_FEATURE (15)..(15): X is F or P
XXXXXXXXXXXXXXX

SEQ ID NO: 620 - protein, 14 aa, Artificial
  Completely synthesized peptide construct
  MISC_FEATURE (1)..(1): X is acetyl or propionyl group, D glycine or D alanine, cyclohexylalanine at amino terminus
  MISC_FEATURE (2)..(2): X is D and E for acidic amino acids
  MISC_FEATURE (3)..(3): X is N or Q for amidated amino acids
  MISC_FEATURE (4)..(4): X is F or P
  MISC_FEATURE (5)..(5): X is GabaX for X2X3 or X3X2 or X2X3 or X3X2 or X3X3 or X2X2
  MISC_FEATURE (6)..(6): X is K, R or H for basic amino acids
  MISC_FEATURE (7)..(7): X is F or P
  MISC_FEATURE (8)..(8): X is F or P
  MISC_FEATURE (9)..(9): X is K, R or H for basic amino acids
  MISC_FEATURE (10)..(10): X is N or Q for amidated amino acids
  MISC_FEATURE (11)..(11): X is I, L or V
  MISC_FEATURE (12)..(12): X is I, L or V
  MISC_FEATURE (13)..(13): X is T or S
  MISC_FEATURE (14)..(14): X is F or P
XXXXXXXXXXXXXX

SEQ ID NO: 621 - protein, 14 aa, Artificial
  Completely synthesized peptide construct
  MISC_FEATURE (1)..(1): X is acetyl or propionyl group, D glycine or D alanine, cyclohexylalanine at amino terminus
  MISC_FEATURE (2)..(2): X is D and E for acidic amino acids
  MISC_FEATURE (3)..(3): X is N or Q for amidated amino acids
  MISC_FEATURE (4)..(4): X is F or P
  MISC_FEATURE (5)..(5): X is I, L or V
  MISC_FEATURE (6)..(6): X is I, L or V
  MISC_FEATURE (7)..(7): X is K, R or H for basic amino acids
  MISC_FEATURE (8)..(8): X is F or P
  MISC_FEATURE (9)..(9): X is F or P
  MISC_FEATURE (10)..(10): X is K, R or H for basic amino acids
  MISC_FEATURE (11)..(11): X is N or Q for amidated amino acids
  MISC_FEATURE (12)..(12): X is GabaX for X2X3 or X3X2 or X2X3 or X3X2 or X3X3 or X2X2
  MISC_FEATURE (13)..(13): X is T or S
  MISC_FEATURE (14)..(14): X is F or P
XXXXXXXXXXXXXX

SEQ ID NO: 622 - protein, 13 aa, Artificial
  Completely synthesized peptide construct
  MISC_FEATURE (1)..(1): X is acetyl or propionyl group, D glycine or D alanine, cyclohexylalanine at amino terminus
  MISC_FEATURE (2)..(2): X is D and E for acidic amino acids
  MISC_FEATURE (3)..(3): X is N or Q for amidated amino acids
  MISC_FEATURE (4)..(4): X is F or P
  MISC_FEATURE (5)..(5): X is GabaX for X2X3 or X3X2 or X2X3 or X3X2 or X3X3 or X2X2
  MISC_FEATURE (6)..(6): X is K, R or H for basic amino acids
  MISC_FEATURE (7)..(7): X is F or P
  MISC_FEATURE (8)..(8): X is F or P
  MISC_FEATURE (9)..(9): X is K, R or H for basic amino acids
  MISC_FEATURE (10)..(10): X is N or Q for amidated amino acids
  MISC_FEATURE (11)..(11): X is GabaX for X2X3 or X3X2 or X2X3 or X3X2 or X3X3 or X2X2
  MISC_FEATURE (12)..(12): X is T or S
  MISC_FEATURE (13)..(13): X is F or P
XXXXXXXXXXXXX

SEQ ID NO: 623 - protein, 21 aa, Homo sapiens
TGTEKLIETYFSKNYQDYEYL

SEQ ID NO: 624 - protein, 21 aa, Artificial
  Completely synthesized peptide construct
  MISC_FEATURE (1)..(1): X is T or S
  MISC_FEATURE (2)..(2): X is A and G
  MISC_FEATURE (3)..(3): X is T or S
  MISC_FEATURE (4)..(4): X is D and E for acidic amino acids
  MISC_FEATURE (5)..(5): X is K, R or H for basic amino acids
  MISC_FEATURE (6)..(6): X is I, L or V
  MISC_FEATURE (7)..(7): X is I, L or V
  MISC_FEATURE (8)..(8): X is D and E for acidic amino acids
  MISC_FEATURE (9)..(9): X is T or S
  MISC_FEATURE (10)..(10): X is F, W or Y for aromatic amino acids
  MISC_FEATURE (11)..(11): X is F, W or Y for aromatic amino acids
  MISC_FEATURE (12)..(12): X is T or S
  MISC_FEATURE (13)..(13): X is K, R or H for basic amino acids
  MISC_FEATURE (14)..(14): X is N or Q for amidated amino acids
  MISC_FEATURE (15)..(15): X is F, W or Y for aromatic amino acids
  MISC_FEATURE (16)..(16): X is N or Q for amidated amino acids
  MISC_FEATURE (17)..(17): X is D and E for acidic amino acids
  MISC_FEATURE (18)..(18): X is F, W or Y for aromatic amino acids
  MISC_FEATURE (19)..(19): X is D and E for acidic amino acids
  MISC_FEATURE (20)..(20): X is F, W or Y for aromatic amino acids
  MISC_FEATURE (21)..(21): X is I, L or V
XXXXXXXXXXXXXXXXXXXXX

SEQ ID NO: 625 - protein, 21 aa, Artificial
  Completely synthesized peptide construct
  MISC_FEATURE (1)..(1): X is T or S
  MISC_FEATURE (2)..(2): X is A and G
  MISC_FEATURE (3)..(3): X is T or S
  MISC_FEATURE (4)..(4): X is D and E for acidic amino acids
  MISC_FEATURE (5)..(5): X is K, R or H for basic amino acids
  MISC_FEATURE (6)..(6): X is I, L or V
  MISC_FEATURE (7)..(7): X is I, L or V
  MISC_FEATURE (8)..(8): X is D and E for acidic amino acids
  MISC_FEATURE (9)..(9): X is T or S
  MISC_FEATURE (10)..(10): X is F, W or Y for aromatic amino acids
  MISC_FEATURE (11)..(11): X is F, W or Y for aromatic amino acids
  MISC_FEATURE (12)..(12): X is T or S
  MISC_FEATURE (13)..(13): X is K, R or H for basic amino acids
  MISC_FEATURE (14)..(14): X is N or Q for amidated amino acids
  MISC_FEATURE (15)..(15): X is F, W or Y for aromatic amino acids
  MISC_FEATURE (16)..(16): X is N or Q for amidated amino acids
  MISC_FEATURE (17)..(17): X is D and E for acidic amino acids
  MISC_FEATURE (18)..(18): X is F, W or Y for aromatic amino acids
  MISC_FEATURE (19)..(19): X is D and E for acidic amino acids
  MISC_FEATURE (20)..(20): X is F, W or Y for aromatic amino acids
  MISC_FEATURE (21)..(21): X is I, L or V
XXXXXXXXXXXXXXXXXXXXX

SEQ ID NO: 626 - protein, 20 aa, Artificial
  Completely synthesized peptide construct
  MISC_FEATURE (1)..(1): X is T or S
  MISC_FEATURE (2)..(2): X is A and G
  MISC_FEATURE (3)..(3): X is T or S
  MISC_FEATURE (4)..(4): X is D and E for acidic amino acids
  MISC_FEATURE (5)..(5): X is K, R or H for basic amino acids
  MISC_FEATURE (6)..(6): X is GabaX  for X2X3 or X3X2 or X2X3 or X3X2 or X3X3 or X2X2
  MISC_FEATURE (7)..(7): X is D and E for acidic amino acids
  MISC_FEATURE (8)..(8): X is T or S
  MISC_FEATURE (9)..(9): X is F, W or Y for aromatic amino acids
  MISC_FEATURE (10)..(10): X is F, W or Y for aromatic amino acids
  MISC_FEATURE (11)..(11): X is T or S
  MISC_FEATURE (12)..(12): X is K, R or H for basic amino acids
  MISC_FEATURE (13)..(13): X is N or Q for amidated amino acids
  MISC_FEATURE (14)..(14): X is F, W or Y for aromatic amino acids
  misc_feature (15)..(15): Xaa can be any naturally occurring amino acid
  MISC_FEATURE (16)..(16): X is D and E for acidic amino acids
  MISC_FEATURE (17)..(17): X is F, W or Y or aromatic amino acids
  MISC_FEATURE (18)..(18): X is D and E for acidic amino acids
  MISC_FEATURE (19)..(19): X is F, W or Y for aromatic amino acids
  MISC_FEATURE (20)..(20): X is I, L or V
XXXXXXXXXXXXXXXXXXXX

SEQ ID NO: 627 - protein, 20 aa, Artificial
  Completely synthesized peptide construct
  MISC_FEATURE (1)..(1): X is T or S
  MISC_FEATURE (2)..(2): X is A and G
  MISC_FEATURE (3)..(3): X is T or S
  MISC_FEATURE (4)..(4): X is D and E for acidic amino acids
  MISC_FEATURE (5)..(5): X is K, R or H for basic amino acids
  MISC_FEATURE (6)..(6): X is I, L or V
  MISC_FEATURE (7)..(7): X is GabaX for X2X3 or X3X2 or X2X3 or X3X2 or X3X3 or X2X2
  MISC_FEATURE (8)..(8): X is T or S
  MISC_FEATURE (9)..(9): X is F, W or Y for aromatic amino acids
  MISC_FEATURE (10)..(10): X is F, W or Y for aromatic amino acids
  MISC_FEATURE (11)..(11): X is T or S
  MISC_FEATURE (12)..(12): X is K, R or H for basic amino acids
  MISC_FEATURE (13)..(13): X is N or Q for amidated amino acids
  MISC_FEATURE (14)..(14): X is F, W or Y for aromatic amino acids
  MISC_FEATURE (15)..(15): X is T or S
  MISC_FEATURE (16)..(16): X is D and E for acidic amino acids
  MISC_FEATURE (17)..(17): X is F, W or Y for aromatic amino acids
  MISC_FEATURE (18)..(18): X is D and E for acidic amino acids
  MISC_FEATURE (19)..(19): X is F, W or Y for aromatic amino acids
  MISC_FEATURE (20)..(20): X is I, L or V
XXXXXXXXXXXXXXXXXXXX

SEQ ID NO: 628 - protein, 19 aa, Artificial
  Completely synthesized peptide construct
  MISC_FEATURE (1)..(1): X is T or S
  MISC_FEATURE (2)..(2): X is A and G
  MISC_FEATURE (3)..(3): X is T or S
  MISC_FEATURE (4)..(4): X is D and E for acidic amino acids
  MISC_FEATURE (5)..(5): X is K, R or H for basic amino acids
  MISC_FEATURE (6)..(6): X is 5-aminopentanoic acid for replacement of 3 or 4 amino acids of X2 and X3
  MISC_FEATURE (7)..(7): X is T or S
  MISC_FEATURE (8)..(8): X is F, W or Y for aromatic amino acids
  MISC_FEATURE (9)..(9): X is F, W or Y for aromatic amino acids
  MISC_FEATURE (10)..(10): X is T or S
  MISC_FEATURE (11)..(11): X is K, R or H for basic amino acids
  MISC_FEATURE (12)..(12): X is N or Q for amidated amino acids
  MISC_FEATURE (13)..(13): X is F, W or Y for aromatic amino acids
  MISC_FEATURE (14)..(14): X is N or Q for amidated amino acids
  MISC_FEATURE (15)..(15): X is D and E for acidic amino acids
  MISC_FEATURE (16)..(16): X is F, W or Y for aromatic amino acids
  MISC_FEATURE (17)..(17): X is D and E for acidic amino acids
  MISC_FEATURE (18)..(18): X is F, W or Y for aromatic amino acids
  MISC_FEATURE (19)..(19): X is I, L or V
XXXXXXXXXXXXXXXXXXX

SEQ ID NO: 629 - protein, 22 aa, Artificial
  Completely synthesized peptide construct
  MISC_FEATURE (1)..(1): X is acetyl or propionyl group, D glycine or D alanine, cyclohexylalanine at amino terminus
  MISC_FEATURE (2)..(2): X is T or S
  MISC_FEATURE (3)..(3): X is A and G
  MISC_FEATURE (4)..(4): X is T or S
  MISC_FEATURE (5)..(5): X is D and E for acidic amino acids
  MISC_FEATURE (6)..(6): X is K, R or H for basic amino acids
  MISC_FEATURE (7)..(7): X is I, L or V
  MISC_FEATURE (8)..(8): X is I, L or V
  MISC_FEATURE (9)..(9): X is D and E for acidic amino acids
  MISC_FEATURE (10)..(10): X is T or S
  MISC_FEATURE (11)..(11): X is F, W or Y for aromatic amino acids
  MISC_FEATURE (12)..(12): X is F, W or Y for aromatic amino acids
  MISC_FEATURE (13)..(13): X is T or S
  MISC_FEATURE (14)..(14): X is K, R or H for basic amino acids
  MISC_FEATURE (15)..(15): X is N or Q for amidated amino acids
  MISC_FEATURE (16)..(16): X is F, W or Y for aromatic amino acids
  MISC_FEATURE (17)..(17): X is N or Q for amidated amino acids
  MISC_FEATURE (18)..(18): X is D and E for acidic amino acids
  MISC_FEATURE (19)..(19): X is F, W or Y for aromatic amino acids
  MISC_FEATURE (20)..(20): X is D and E for acidic amino acids
  MISC_FEATURE (21)..(21): X is F, W or Y for aromatic amino acids
  MISC_FEATURE (22)..(22): X is I, L or V
XXXXXXXXXXXXXXXXXXXXXX

SEQ ID NO: 630 - protein, 22 aa, Artificial
  Completely synthesized peptide construct
  MISC_FEATURE (1)..(1): X is acetly or propionyl group, D glycine or D alanine, cyclohexylalanine at amino terminus
  MISC_FEATURE (2)..(2): X is T or S
  MISC_FEATURE (3)..(3): X is A and G
  MISC_FEATURE (4)..(4): X is T or S
  MISC_FEATURE (5)..(5): X is D and E for acidic amino acids
  MISC_FEATURE (6)..(6): X is K, R or H for basic amino acids
  MISC_FEATURE (7)..(7): X is I, L or V
  MISC_FEATURE (8)..(8): X is I, L or V
  MISC_FEATURE (9)..(9): X is D and E for acidic amino acids
  MISC_FEATURE (10)..(10): X is T or S
  MISC_FEATURE (11)..(11): X is F, W or Y for aromatic amino acids
  MISC_FEATURE (12)..(12): X is F, W or Y for aromatic amino acids
  MISC_FEATURE (13)..(13): X is T or S
  MISC_FEATURE (14)..(14): X is K, R or H for basic amino acids
  MISC_FEATURE (15)..(15): X is N or Q for amidated amino acids
  MISC_FEATURE (16)..(16): X is F, W or Y for aromatic amino acids
  MISC_FEATURE (17)..(17): X is N or Q for amidated amino acids
  MISC_FEATURE (18)..(18): X is D and E for acidic amino acids
  MISC_FEATURE (19)..(19): X is F, W or Y for aromatic amino acids
  MISC_FEATURE (20)..(20): X is D and E for acidic amino acids
  MISC_FEATURE (21)..(21): X is F, W or Y for aromatic amino acids
  MISC_FEATURE (22)..(22): X is I, L or V
XXXXXXXXXXXXXXXXXXXXXX

SEQ ID NO: 631 - protein, 21 aa, Artificial
  Completely synthesized peptide construct
  MISC_FEATURE (1)..(1): X is acetyl or propionyl group, D glycine or D alanine, cyclohexylalanine at amino terminus
  MISC_FEATURE (2)..(2): X is T or S
  MISC_FEATURE (3)..(3): X is A and G
  MISC_FEATURE (4)..(4): X is T or S
  MISC_FEATURE (5)..(5): X is D and E for acidic amino acids
  MISC_FEATURE (6)..(6): X is K, R or H for basic amino acids
  MISC_FEATURE (7)..(7): X is GabaX2 for X2X3 or X3X2 or X2X3 or X3X2 or X3X3 or X2X2
  MISC_FEATURE (8)..(8): X is D and E for acidic amino acids
  MISC_FEATURE (9)..(9): X is T or S
  MISC_FEATURE (10)..(10): X is F, W or Y for aromatic amino acids
  MISC_FEATURE (11)..(11): X is F, W or Y for aromatic amino acids
  MISC_FEATURE (12)..(12): X is T or S
  MISC_FEATURE (13)..(13): X is K, R or H for basic amino acids
  MISC_FEATURE (14)..(14): X is N or Q for amidated amino acids
  MISC_FEATURE (15)..(15): X is F, W or Y for aromatic amino acids
  MISC_FEATURE (16)..(16): X is N or Q for amidated amino acids
  MISC_FEATURE (17)..(17): X is D and E for acidic amino acids
  MISC_FEATURE (18)..(18): X is F, W or Y for aromatic amino acids
  MISC_FEATURE (19)..(19): X is D and E for aciidic amino acids
  MISC_FEATURE (20)..(20): X is F, W or Y for aromatic amino acids
  MISC_FEATURE (21)..(21): X is I, L or V
XXXXXXXXXXXXXXXXXXXXX

SEQ ID NO: 632 - protein, 21 aa, Artificial
  Completely synthesized peptide construct
  MISC_FEATURE (1)..(1): X is acetyl or propionyl group, D glycine or D alanine, cyclohexylalanine at amino terminus
  MISC_FEATURE (2)..(2): X is T or S
  MISC_FEATURE (3)..(3): X is A and G
  MISC_FEATURE (4)..(4): X is T or S
  MISC_FEATURE (5)..(5): X is D and E for acidic amino acids
  MISC_FEATURE (6)..(6): X is K, R or H for basic amino acids
  MISC_FEATURE (7)..(7): X is I, L or V
  MISC_FEATURE (8)..(8): X is GabaX for X2X3 or X3X2 or X2X3 or X3X2 or X3X3 or X2X2
  MISC_FEATURE (9)..(9): X is T or S
  MISC_FEATURE (10)..(10): X is F, W or Y for aromatic amino acids
  MISC_FEATURE (11)..(11): X is F, W or Y for aromatic amino acids
  MISC_FEATURE (12)..(12): X is T or S
  MISC_FEATURE (13)..(13): X is K, R or H for basic amino acids
  MISC_FEATURE (14)..(14): X is N or Q for amidated amino acids
  MISC_FEATURE (15)..(15): X is F, W or Y for aromatic amino acids
  MISC_FEATURE (16)..(16): X is N or Q for amidated amino acids
  MISC_FEATURE (17)..(17): X is D and E for acidic amino acids
  MISC_FEATURE (18)..(18): X is F, W or Y for aromatic amino acids
  MISC_FEATURE (19)..(19): X is D and E for acidic amino acids
  MISC_FEATURE (20)..(20): X is F, W or Y for aromatic amino acids
  MISC_FEATURE (21)..(21): X is I, L or V
XXXXXXXXXXXXXXXXXXXXX

SEQ ID NO: 633 - protein, 20 aa, Artificial
  Completely synthesized peptide construct
  MISC_FEATURE (1)..(1): X is acetyl or propionyl group, D glycine or D alanine, cyclohexylalanine at amino terminus
  MISC_FEATURE (2)..(2): X is T or S
  MISC_FEATURE (3)..(3): X is A and G
  MISC_FEATURE (4)..(4): X is T or S
  MISC_FEATURE (5)..(5): X is D and E for acidic amino acids
  MISC_FEATURE (6)..(6): X is K, R or H for basic amino acids
  MISC_FEATURE (7)..(7): X is 5-aminopentanoic acid for replacement of 3 or 4 amino acids of X2 and X3
  MISC_FEATURE (8)..(8): X is T or S
  MISC_FEATURE (9)..(9): X is F, W or Y for aromatic amino acids
  MISC_FEATURE (10)..(10): X is F, W or Y for aromatic amino acids
  MISC_FEATURE (11)..(11): X is T or S
  MISC_FEATURE (12)..(12): X is K, R or H for basic amino acids
  MISC_FEATURE (13)..(13): X is N or Q for amidated amino acids
  MISC_FEATURE (14)..(14): X is F, W or Y for aromatic amino acids
  MISC_FEATURE (15)..(15): X is N or Q for amidated amino acids
  MISC_FEATURE (16)..(16): X is D and E for acidic amino acids
  MISC_FEATURE (17)..(17): X is F, W or Y for aromatic amino acids
  MISC_FEATURE (18)..(18): X is D and E for basic amino acids
  MISC_FEATURE (19)..(19): X is F, W or Y for aromatic amino acids
  MISC_FEATURE (20)..(20): X is I, L or V
XXXXXXXXXXXXXXXXXXXX

SEQ ID NO: 634 - protein, 13 aa, Artificial
  Completely synthesized peptide construct
  MISC_FEATURE (1)..(1): X is K, R or H for basic amino acids
  MISC_FEATURE (2)..(2): X is T or S
  MISC_FEATURE (3)..(3): X is I, L or V
  MISC_FEATURE (4)..(4): X is A and G
  MISC_FEATURE (5)..(5): X is K, R or H for basic amino acids
  MISC_FEATURE (6)..(6): X is F, W or Y for aromatic amino acids
  MISC_FEATURE (7)..(7): X is I, L or V
  MISC_FEATURE (8)..(8): X is A and G
  MISC_FEATURE (9)..(9): X is K, R or H for basic amino acids
  MISC_FEATURE (10)..(10): X is F or P
  MISC_FEATURE (11)..(11): X is D and E for acidic amino acids
  MISC_FEATURE (12)..(12): X is K, R or H for basic amino acids
  MISC_FEATURE (13)..(13): X is F or P
XXXXXXXXXXXXX

SEQ ID NO: 635 - protein, 14 aa, Artificial
  Completely synthesized peptide construct
  MISC_FEATURE (1)..(1): X is acetyl or propionyl group, D glycine or D alanine, cyclohexylalanine at amino terminus
  MISC_FEATURE (2)..(2): X is K, R or H for basic amino acids
  MISC_FEATURE (3)..(3): X is T or S
  MISC_FEATURE (4)..(4): X is I, L or V
  MISC_FEATURE (5)..(5): X is A and G
  MISC_FEATURE (6)..(6): X is K, R or H for basic amino acids
  MISC_FEATURE (7)..(7): X is F, W or Y for aromatic amino acids
  MISC_FEATURE (8)..(8): X is I, L or V
  MISC_FEATURE (9)..(9): X is A and G
  MISC_FEATURE (10)..(10): X is K, R or H for basic amino acids
  MISC_FEATURE (11)..(11): X is F or P
  MISC_FEATURE (12)..(12): X is D and E for acidic amino acids
  MISC_FEATURE (13)..(13): X is K, R or H for basic amino acids
  MISC_FEATURE (14)..(14): X is F or P
XXXXXXXXXXXXXX

SEQ ID NO: 636 - protein, 16 aa, Homo sapiens
VGWYRPPFSRVVHLYR

SEQ ID NO: 637 - protein, 16 aa, Artificial
  Completely synthesized peptide construct
  MISC_FEATURE (1)..(1): X is I, L or V
  MISC_FEATURE (2)..(2): X is A and G
  MISC_FEATURE (3)..(3): X is F, W or Y for aromatic amino acids
  MISC_FEATURE (4)..(4): X is F, W or Y for aromatic amino acids
  MISC_FEATURE (5)..(5): X is K, R or H for basic amino acids
  MISC_FEATURE (6)..(6): X is F or P
  MISC_FEATURE (7)..(7): X is F or P
  MISC_FEATURE (8)..(8): X is F or P
  MISC_FEATURE (9)..(9): X is T or S
  MISC_FEATURE (10)..(10): X is K, R or H for basic amino acids
  MISC_FEATURE (11)..(11): X is I, L or V
  MISC_FEATURE (12)..(12): X is I, L or V
  MISC_FEATURE (13)..(13): X is K, R or H for basic amino acids
  MISC_FEATURE (14)..(14): X is I, L or V
  MISC_FEATURE (15)..(15): X is F, W or Y for aromatic amino acids
  MISC_FEATURE (16)..(16): X is K, R or H for basic amino acids
XXXXXXXXXXXXXXXX

SEQ ID NO: 638 - protein, 15 aa, Artificial
  Completely synthesized peptide construct
  MISC_FEATURE (1)..(1): X is I, L or V
  MISC_FEATURE (2)..(2): X is A and G
  MISC_FEATURE (3)..(3): X is F, W or Y for aromatic amino acids
  MISC_FEATURE (4)..(4): X is F, W or Y for aromatic amino acids
  MISC_FEATURE (5)..(5): X is K, R or H for basic amino acids
  MISC_FEATURE (6)..(6): X is F or P
  MISC_FEATURE (7)..(7): X is F or P
  MISC_FEATURE (8)..(8): X is F or P
  MISC_FEATURE (9)..(9): X is T or S
  MISC_FEATURE (10)..(10): X is K, R or H for basic amino acids
  MISC_FEATURE (11)..(11): X is GabaX for X2X3 or X3X2 or X2X3 or X3X2 or X3X3 or X2X2
  MISC_FEATURE (12)..(12): X is K, R or H for basic amino acids
  MISC_FEATURE (13)..(13): X is I, L or V
  MISC_FEATURE (14)..(14): X is F, W or Y for aromatic amino acids
  MISC_FEATURE (15)..(15): X is K, R or H for basic amino acids
XXXXXXXXXXXXXXX

SEQ ID NO: 639 - protein, 17 aa, Artificial
  Completely synthesized peptide construct
  MISC_FEATURE (1)..(1): X is acetyl or propionyl group, D glycine or D alanine, cyclohexylalanine at amino terminus
  MISC_FEATURE (2)..(2): X is I, L or V
  MISC_FEATURE (3)..(3): X is A and G
  MISC_FEATURE (4)..(4): X is F, W or Y for aromatic amino acids
  MISC_FEATURE (5)..(5): X is F, W or Y for aromatic amino acids
  MISC_FEATURE (6)..(6): X is F, W or Y for aromatic amino acids
  MISC_FEATURE (7)..(7): X is F or P
  MISC_FEATURE (8)..(8): X is F or P
  MISC_FEATURE (9)..(9): X is F or P
  MISC_FEATURE (10)..(10): X is T or S
  MISC_FEATURE (11)..(11): X is K, R or H for basic amino acids
  MISC_FEATURE (12)..(12): X is I, L or V
  MISC_FEATURE (13)..(13): X is I, L or V
  MISC_FEATURE (14)..(14): X is K, R or H for basic amino acids
  MISC_FEATURE (15)..(15): X is I, L or V
  MISC_FEATURE (16)..(16): X is F, W or Y for aromatic amino acids
  MISC_FEATURE (17)..(17): X is K, R or H for basic amino acids
XXXXXXXXXXXXXXXXX

SEQ ID NO: 640 - protein, 16 aa, Artificial
  Completely synthesized peptide construct
  MISC_FEATURE (1)..(1): X is acetyl or propionyl group, D glycine or D alanine, cyclohexylalanine at amino terminus
  MISC_FEATURE (2)..(2): X is I, L or V
  MISC_FEATURE (3)..(3): X is A and G
  MISC_FEATURE (4)..(4): X is F, W or Y for aromatic amino acids
  MISC_FEATURE (5)..(5): X is F, W or Y for aromatic amino acids
  MISC_FEATURE (6)..(6): X is K, R or H for basic amino acids
  MISC_FEATURE (7)..(7): X is F or P
  MISC_FEATURE (8)..(8): X is F or P
  MISC_FEATURE (9)..(9): X is F or P
  MISC_FEATURE (10)..(10): X is T or S
  MISC_FEATURE (11)..(11): X is K, R or H for basic amino acids
  MISC_FEATURE (12)..(12): X is GabaX for X2X3 or X3X2 or X2X3 or X3X2 or X3X3 or X2X2
  MISC_FEATURE (13)..(13): X is K, R or H for basic amino acids
  MISC_FEATURE (14)..(14): X is I, L or V
  MISC_FEATURE (15)..(15): X is F, W or Y for aromatic amino acids
  MISC_FEATURE (16)..(16): X is K, R or H for basic amino acids
XXXXXXXXXXXXXXXX

SEQ ID NO: 641 - protein, 16 aa, Homo sapiens
VFLCLQYRLRGKLRAE

SEQ ID NO: 642 - protein, 16 aa, Artificial
  Completely synthesized peptide construct
  MISC_FEATURE (1)..(1): X is I, L or V
  MISC_FEATURE (2)..(2): X is F or P
  MISC_FEATURE (3)..(3): X is I, L or V
  MISC_FEATURE (4)..(4): X is C or S
  MISC_FEATURE (5)..(5): X is I, L or V
  MISC_FEATURE (6)..(6): X is N or Q for amidated amino acids
  MISC_FEATURE (7)..(7): X is F, W or Y for aromatic amino acids
  MISC_FEATURE (8)..(8): X is K, R or H for basic amino acids
  MISC_FEATURE (9)..(9): X is I, L or V
  MISC_FEATURE (10)..(10): X is K, R or H for basic amino acids
  MISC_FEATURE (11)..(11): X is A and G
  MISC_FEATURE (12)..(12): X is K, R or H for basic amino acids
  MISC_FEATURE (13)..(13): X is I, L or V
  MISC_FEATURE (14)..(14): X is K, R or H for basic amino acids
  MISC_FEATURE (15)..(15): X is A and G
  MISC_FEATURE (16)..(16): X is D and E for acidic amino acids
XXXXXXXXXXXXXXXX

SEQ ID NO: 643 - protein, 17 aa, Artificial
  Completely synthesized peptide construct
  MISC_FEATURE (1)..(1): X is acetyl or propionyl group, D glycine or D alanine, cyclohexylalanine at amino terminus
  MISC_FEATURE (2)..(2): X is I, L or V
  MISC_FEATURE (3)..(3): X is F or P
  MISC_FEATURE (4)..(4): X is I, L or V
  MISC_FEATURE (5)..(5): X is C or S
  MISC_FEATURE (6)..(6): X is I, L or V
  MISC_FEATURE (7)..(7): X is N or Q for amidated amino acids
  MISC_FEATURE (8)..(8): X is F, W or Y for aromatic amino acids
  MISC_FEATURE (9)..(9): X is K, R or H for basic amino acids
  MISC_FEATURE (10)..(10): X is I, L or V
  MISC_FEATURE (11)..(11): X is K, R or H for basic amino acids
  MISC_FEATURE (12)..(12): X is A and G
  MISC_FEATURE (13)..(13): X is K, R or H for basic amino acids
  MISC_FEATURE (14)..(14): X is I, L or V
  MISC_FEATURE (15)..(15): X is K, R or H for basic amino acids
  MISC_FEATURE (16)..(16): X is A and G
  MISC_FEATURE (17)..(17): X is D and E for acidic amino acids
XXXXXXXXXXXXXXXXX

SEQ ID NO: 644 - protein, 21 aa, Artificial
  Completely synthesized peptide construct
MEVGWYRPPFSRVVHLYRNGK

SEQ ID NO: 645 - protein, 21 aa, Artificial
  Completely synthesized peptide construct
  MISC_FEATURE (1)..(1): X is M or Nle (Norleucine)
  MISC_FEATURE (2)..(2): X is D and E for acidic amino acids
  MISC_FEATURE (3)..(3): X is I, L or V
  MISC_FEATURE (4)..(4): X is A and G
  MISC_FEATURE (5)..(5): X is F, W or Y for aromatic amino acids
  MISC_FEATURE (6)..(6): X is F, W or Y for aromatic amino acids
  MISC_FEATURE (7)..(7): X is K, R or H for basic amino acids
  MISC_FEATURE (8)..(8): X is F or P
  MISC_FEATURE (9)..(9): X is F or P
  MISC_FEATURE (10)..(10): X is F or P
  MISC_FEATURE (11)..(11): X is T or S
  MISC_FEATURE (12)..(12): X is K, R or H for basic amino acids
  MISC_FEATURE (13)..(13): X is I, L or V
  MISC_FEATURE (14)..(14): X is I, L or V
  MISC_FEATURE (15)..(15): X is K, R or H for basic amino acids
  MISC_FEATURE (16)..(16): X is I, L or V
  MISC_FEATURE (17)..(17): X is F, W or Y for aromatic amino acids
  MISC_FEATURE (18)..(18): X is K, R or H for basic amino acids
  MISC_FEATURE (19)..(19): X is N or Q for amidated amino acids
  MISC_FEATURE (20)..(20): X is A and G
  MISC_FEATURE (21)..(21): X is K, R or H for basic amino acids
XXXXXXXXXXXXXXXXXXXXX

SEQ ID NO: 646 - protein, 20 aa, Artificial
  Completely synthesized peptide construct
  MISC_FEATURE (1)..(1): X is M or Nle (Norleucine)
  MISC_FEATURE (2)..(2): X is GabaX for X2X3 or X3X2 or X2X3 or X3X2 or X3X3 or X2X2
  MISC_FEATURE (3)..(3): X is A and G
  MISC_FEATURE (4)..(4): X is F, W or Y for aromatic amino acids
  MISC_FEATURE (5)..(5): X is F, W or Y for aromatic amino acids
  MISC_FEATURE (6)..(6): X is K, R or H for basic amino acids
  MISC_FEATURE (7)..(7): X is F or P
  MISC_FEATURE (8)..(8): X is F or P
  MISC_FEATURE (9)..(9): X is F or P
  MISC_FEATURE (10)..(10): X is T or S
  MISC_FEATURE (11)..(11): X is K, R or H for basic amino acids
  MISC_FEATURE (12)..(12): X is I, L or V
  MISC_FEATURE (13)..(13): X is I, L or V
  MISC_FEATURE (14)..(14): X is K, R or H for basic amino acids
  MISC_FEATURE (15)..(15): X is I, L or V
  MISC_FEATURE (16)..(16): X is F, W or Y for aromatic amino acids
  MISC_FEATURE (17)..(17): X is K, R or H for basic amino acids
  MISC_FEATURE (18)..(18): X is N or Q for amidated amino acids
  MISC_FEATURE (19)..(19): X is A and G
  MISC_FEATURE (20)..(20): X is K, R or H for basic amino acids
XXXXXXXXXXXXXXXXXXXX

SEQ ID NO: 647 - protein, 20 aa, Artificial
  Completely synthesized peptide construct
  MISC_FEATURE (1)..(1): X is M or Nle (Norleucine)
  MISC_FEATURE (2)..(2): X is D and E for acidic amino acids
  MISC_FEATURE (3)..(3): X is I, L or V
  MISC_FEATURE (4)..(4): X is A and G
  MISC_FEATURE (5)..(5): X is F, W or Y for aromatic amino acids
  MISC_FEATURE (6)..(6): X is F, W or Y for aromatic amino acids
  MISC_FEATURE (7)..(7): X is K, R or H for basic amino acids
  MISC_FEATURE (8)..(8): X is F or P
  MISC_FEATURE (9)..(9): X is F or P
  MISC_FEATURE (10)..(10): X is F or P
  MISC_FEATURE (11)..(11): X is T or S
  MISC_FEATURE (12)..(12): X is K, R or H for basic amino acids
  MISC_FEATURE (13)..(13): X is Gaba X for X2X3 or X3X2 or X2X3 or X3X2 or X3X3 or X2X2
  misc_feature (14)..(14): Xaa can be any naturally occurring amino acid
  MISC_FEATURE (15)..(15): X is I, L or V
  MISC_FEATURE (16)..(16): X is F, W or Y for aromatic amino acids
  MISC_FEATURE (17)..(17): X is K, R or H for basic amino acids
  MISC_FEATURE (18)..(18): X is N or Q for amidated amino acids
  MISC_FEATURE (19)..(19): X is A and G
  MISC_FEATURE (20)..(20): X is K, R or H for basic amino acids
XXXXXXXXXXXXXXXXXXXX

SEQ ID NO: 648 - protein, 19 aa, Artificial
  Completely synthesized peptide construct
  MISC_FEATURE (1)..(1): X is M or Nle (Norleucine)
  MISC_FEATURE (2)..(2): X is GabaX for X2X3 or X3X2 or X2X3 or X3X2 or X3X3 or X2X2
  MISC_FEATURE (3)..(3): X is A and G
  MISC_FEATURE (4)..(4): X is F, W or Y for aromatic amino acids
  MISC_FEATURE (5)..(5): X is F, W or Y for aromatic amino acids
  MISC_FEATURE (6)..(6): X is K, R or H for basic amino acids
  MISC_FEATURE (7)..(7): X is F or P
  MISC_FEATURE (8)..(8): X is F or P
  MISC_FEATURE (9)..(9): X is F or P
  MISC_FEATURE (10)..(10): X is T or S
  MISC_FEATURE (11)..(11): X is K, R or H for basic amino acids
  MISC_FEATURE (12)..(12): X is GabaX for X2X3 or X3X2 or X2X3 or X3X2 or X3X3 or X2X2
  MISC_FEATURE (13)..(13): X is K, R or H for basic amino acids
  MISC_FEATURE (14)..(14): X is I, L or V
  MISC_FEATURE (15)..(15): X is F, W or Y for aromatic amino acids
  MISC_FEATURE (16)..(16): X is K, R or H for basic amino acids
  MISC_FEATURE (17)..(17): X is N or Q for amidated amino acids
  MISC_FEATURE (18)..(18): X is A and G
  MISC_FEATURE (19)..(19): X is K, R or H for basic amino acids
XXXXXXXXXXXXXXXXXXX

SEQ ID NO: 649 - protein, 22 aa, Artificial
  Completely synthesized peptide construct
  MISC_FEATURE (1)..(1): X is acetyl or propionyl group, D glycine or D alanine, cyclohexylalanine at amino terminus
  MISC_FEATURE (2)..(2): X is M or Nle (Norleucine)
  MISC_FEATURE (3)..(3): X is D or E for acidic amino acids
  MISC_FEATURE (4)..(4): X is I, L or V
  MISC_FEATURE (5)..(5): X is A and G
  MISC_FEATURE (6)..(6): X is F, W or Y for aromatic amino acids
  MISC_FEATURE (7)..(7): X is F, W or Y for aromatic amino acids
  MISC_FEATURE (8)..(8): X is K, R or H for basic amino acids
  MISC_FEATURE (9)..(9): X is F or P
  MISC_FEATURE (10)..(10): X is F or P
  MISC_FEATURE (11)..(11): X is F or P
  MISC_FEATURE (12)..(12): X is T or S
  MISC_FEATURE (13)..(13): X is K, R or H for basic amino acids
  MISC_FEATURE (14)..(14): X is I, L or V
  MISC_FEATURE (15)..(15): X is I, L or V
  MISC_FEATURE (16)..(16): X is K, R or H for basic amino acids
  MISC_FEATURE (17)..(17): X is I, L or V
  MISC_FEATURE (18)..(18): X is F, W or Y for aromatic amino acids
  MISC_FEATURE (19)..(19): X is K, R or H for basic amino acids
  MISC_FEATURE (20)..(20): X is N or Q for amidated amino acids
  MISC_FEATURE (21)..(21): X is A and G
  MISC_FEATURE (22)..(22): X is K, R or H for basic amino acids
XXXXXXXXXXXXXXXXXXXXXX

SEQ ID NO: 650 - protein, 21 aa, Artificial
  Completely synthesized peptide construct
  MISC_FEATURE (1)..(1): X is acetyl or propionyl group, D glycine or D alanine, cyclohexylalanine at amino terminus
  MISC_FEATURE (2)..(2): X is M or Nle(Norleucine)
  MISC_FEATURE (3)..(3): X is GabaX for X2X3 or X3X2 or X2X3 or X3X2 or X3X3 or X2X2
  MISC_FEATURE (4)..(4): X is A and G
  MISC_FEATURE (5)..(5): X is F, W or Y for aromatic amino acids
  MISC_FEATURE (6)..(6): X is F, W or Y for aromatic amino acids
  MISC_FEATURE (7)..(7): X is K, R or H for basic amino acids
  MISC_FEATURE (8)..(8): X is F or P
  MISC_FEATURE (9)..(9): X is F or P
  MISC_FEATURE (10)..(10): X is F or P
  MISC_FEATURE (11)..(11): X is T or S
  MISC_FEATURE (12)..(12): X is K, R or H for basic amino acids
  MISC_FEATURE (13)..(13): X is I, L or V
  MISC_FEATURE (14)..(14): X is I, L or V
  MISC_FEATURE (15)..(15): X is K, R or H for basic amino acids
  MISC_FEATURE (16)..(16): X is I, L or V
  MISC_FEATURE (17)..(17): X is F, W or Y for aromatic amino acids
  MISC_FEATURE (18)..(18): X is K, R or H for basic amino acids
  MISC_FEATURE (19)..(19): X is N or Q for amidated amino acids
  MISC_FEATURE (20)..(20): X is A and G
  MISC_FEATURE (21)..(21): X is K, R or H for basic amino acids
XXXXXXXXXXXXXXXXXXXXX

SEQ ID NO: 651 - protein, 21 aa, Artificial
  Completely synthesized peptide construct
  MISC_FEATURE (1)..(1): X is acetyl or propionyl group, D glycine or D alanine, cyclohexylalanine at amino terminus
  MISC_FEATURE (2)..(2): X is M or Nle (Norleucine)
  MISC_FEATURE (3)..(3): X is D and E for acidic amino acids
  MISC_FEATURE (4)..(4): X is I, L or V
  MISC_FEATURE (5)..(5): X is A and G
  MISC_FEATURE (6)..(6): X is F, W or Y for aromatic amino acids
  MISC_FEATURE (7)..(7): X is F, W or Y for aromatic amino acids
  MISC_FEATURE (8)..(8): X is K, R or H for basic amino acids
  MISC_FEATURE (9)..(9): X is F or P
  MISC_FEATURE (10)..(10): X is F or P
  MISC_FEATURE (11)..(11): X is F or P
  MISC_FEATURE (12)..(12): X is T or S
  MISC_FEATURE (13)..(13): X is K, R or H for basic amino acids
  MISC_FEATURE (14)..(14): X is GabaX for X2X3 or X3X2 or X2X3 or X3X2 or X3X3 or X2X2
  MISC_FEATURE (15)..(15): X is K, R or H for basic amino acids
  MISC_FEATURE (16)..(16): X is I, L or V
  MISC_FEATURE (17)..(17): X is F, W or Y for aromatic amino acids
  MISC_FEATURE (18)..(18): X is K, R or H for basic amino acids
  MISC_FEATURE (19)..(19): X is N or Q for amidated amino acids
  MISC_FEATURE (20)..(20): X is A and G
  MISC_FEATURE (21)..(21): X is K, R or H for basic amino acids
XXXXXXXXXXXXXXXXXXXXX

SEQ ID NO: 652 - protein, 20 aa, Artificial
  Completely synthesized peptide construct
  MISC_FEATURE (1)..(1): X is acetyl or propionyl group, D glycine or D alanine, cyclohexylalanine at amino terminus
  MISC_FEATURE (2)..(2): X is M or Nle (Norleucine)
  MISC_FEATURE (3)..(3): X is GabaX for X2X3 or X3X2 or X2X3 or X3X2 or X3X3 or X2X2
  MISC_FEATURE (4)..(4): X is A and G
  MISC_FEATURE (5)..(5): X is F, W or Y for aromatic amino acids
  MISC_FEATURE (6)..(6): X is F, W or Y for aromatic amino acids
  MISC_FEATURE (7)..(7): X is K, R or H for basic amino acids
  MISC_FEATURE (8)..(8): X is F or P
  MISC_FEATURE (9)..(9): X is F or P
  MISC_FEATURE (10)..(10): X is F or P
  MISC_FEATURE (11)..(11): X is T or S
  MISC_FEATURE (12)..(12): X is K, R or H for basic amino acids
  MISC_FEATURE (13)..(13): X is GabaX for X2X3 or X3X2 or X2X3 or X3X2 or X3X3 or X2X2
  MISC_FEATURE (14)..(14): X is K, R or H for basic amino acids
  MISC_FEATURE (15)..(15): X is I, L or V
  MISC_FEATURE (16)..(16): X is F, W or Y for aromatic amino acids
  MISC_FEATURE (17)..(17): X is K, R or H for basic amino acids
  MISC_FEATURE (18)..(18): X is N or Q for amidated amino acids
  MISC_FEATURE (19)..(19): X is A and G
  MISC_FEATURE (20)..(20): X is K, R or H for basic amino acids
XXXXXXXXXXXXXXXXXXXX

SEQ ID NO: 653 - protein, 14 aa, Homo sapiens
DGSSWEGVGVVPDV

SEQ ID NO: 654 - protein, 8 aa, Artificial
  Completely synthesized peptide construct
TSSEVATE

SEQ ID NO: 655 - protein, 8 aa, Artificial
  Completely synthesized peptide construct
  MISC_FEATURE (1)..(1): X is T or S
  MISC_FEATURE (2)..(2): X is T or S
  MISC_FEATURE (3)..(3): X is T or S
  MISC_FEATURE (4)..(4): X is D and E for acidic amino acids
  MISC_FEATURE (5)..(5): X is I, L or V
  MISC_FEATURE (6)..(6): X is A and G
  MISC_FEATURE (7)..(7): X is T or S
  MISC_FEATURE (8)..(8): X is D and E for acidic amino acids
XXXXXXXX

SEQ ID NO: 656 - protein, 7 aa, Artificial
  Completely synthesized peptide construct
  MISC_FEATURE (1)..(1): X is T or S
  MISC_FEATURE (2)..(2): X is T or S
  MISC_FEATURE (3)..(3): X is T or S
  MISC_FEATURE (4)..(4): X is GabaX for X2X3 or X3X2 or X2X3 or X3X2 or X3X3 or X2X2
  MISC_FEATURE (5)..(5): X is A and G
  MISC_FEATURE (6)..(6): X is T or S
  MISC_FEATURE (7)..(7): X is D and E for acidic amino acids
XXXXXXX

SEQ ID NO: 657 - protein, 9 aa, Artificial
  Completely synthesized peptide construct
  MISC_FEATURE (1)..(1): X is acetyl or propionyl group, D glycine or D alanine, cyclohexylalanine at amino terminus
  MISC_FEATURE (2)..(2): X is T or S
  MISC_FEATURE (3)..(3): X is T or S
  MISC_FEATURE (4)..(4): X is T or S
  MISC_FEATURE (5)..(5): X is D and E for acidic amino acids
  MISC_FEATURE (6)..(6): X is I, L or V
  MISC_FEATURE (7)..(7): X is A and G
  MISC_FEATURE (8)..(8): X is T or S
  MISC_FEATURE (9)..(9): X is D and E for acidic amino acids
XXXXXXXXX

SEQ ID NO: 658 - protein, 8 aa, Artificial
  Completely synthesized peptide construct
  MISC_FEATURE (1)..(1): X is acetyl or propionyl group, D glycine or D alanine, cyclohexylalanine at amino terminus
  MISC_FEATURE (2)..(2): X is T or S
  MISC_FEATURE (3)..(3): X is T or S
  MISC_FEATURE (4)..(4): X is T or S
  MISC_FEATURE (5)..(5): X is GabaX for X2X3 or X3X2 or X2X3 or X3X2 or X3X3 or X2X2
  MISC_FEATURE (6)..(6): X is A and G
  MISC_FEATURE (7)..(7): X is T or S
  MISC_FEATURE (8)..(8): X is D and E for acidic amino acids
XXXXXXXX

SEQ ID NO: 659 - protein, 8 aa, Artificial
  Completely synthesized peptide construct
TSSEAATE

SEQ ID NO: 660 - protein, 8 aa, Artificial
  Completely synthesized peptide construct
DTNLASST

SEQ ID NO: 661 - protein, 8 aa, Artificial
  Completely synthesized peptide construct
DTALASST

SEQ ID NO: 662 - protein, 8 aa, Artificial
  Completely synthesized peptide construct
  MISC_FEATURE (1)..(1): X is T or S
  MISC_FEATURE (2)..(2): X is T or S
  MISC_FEATURE (3)..(3): X is T or S
  MISC_FEATURE (4)..(4): X is D and E for acidic amino acids
  MISC_FEATURE (5)..(5): X is A and G
  MISC_FEATURE (6)..(6): X is A and G
  MISC_FEATURE (7)..(7): X is T or S
  MISC_FEATURE (8)..(8): X is D and E for acidic amino acids
XXXXXXXX

SEQ ID NO: 663 - protein, 9 aa, Artificial
  Completely synthesized peptide construct
  MISC_FEATURE (1)..(1): X is acetyl or propionyl group, D glycine or D alanine, cyclohexylalanine at amino terminus
  MISC_FEATURE (2)..(2): X is T or S
  MISC_FEATURE (3)..(3): X is T or S
  MISC_FEATURE (4)..(4): X is T or S
  MISC_FEATURE (5)..(5): X is D and E for acidic amino acids
  MISC_FEATURE (6)..(6): X is A and G
  MISC_FEATURE (7)..(7): X is A and G
  MISC_FEATURE (8)..(8): X is T or S
  MISC_FEATURE (9)..(9): X is D and E for acidic amino acids
XXXXXXXXX

SEQ ID NO: 664 - protein, 20 aa, Homo sapiens
GPTHLFQPSLVLDMAKVLLD

SEQ ID NO: 665 - protein, 20 aa, Artificial
  Completely synthesized peptide construct
  MISC_FEATURE (1)..(1): X is A and G
  MISC_FEATURE (2)..(2): X is F or P
  MISC_FEATURE (3)..(3): X is T or S
  MISC_FEATURE (4)..(4): X is K, R or H for basic amino acids
  MISC_FEATURE (5)..(5): X is I, L or V
  MISC_FEATURE (6)..(6): X is F, W or Y for aromatic amino acids
  MISC_FEATURE (7)..(7): X is N or Q for amidated amino acids
  MISC_FEATURE (8)..(8): X is F or P
  MISC_FEATURE (9)..(9): X is T or S
  MISC_FEATURE (10)..(10): X is I, L or V
  MISC_FEATURE (11)..(11): X is I, L or V
  MISC_FEATURE (12)..(12): X is I, L or V
  MISC_FEATURE (13)..(13): X is D and E for acidic amino acids
  MISC_FEATURE (14)..(14): X is M or Nle (Norleucine)
  MISC_FEATURE (15)..(15): X is A and G
  MISC_FEATURE (16)..(16): X is K, R or H for basic amino acids
  MISC_FEATURE (17)..(17): X is I, L or V
  MISC_FEATURE (18)..(18): X is I, L or V
  MISC_FEATURE (19)..(19): X is I, L or V
  MISC_FEATURE (20)..(20): X is D and E for acidic amino acids
XXXXXXXXXXXXXXXXXXXX

SEQ ID NO: 666 - protein, 19 aa, Artificial
  Completely synthesized peptide construct
  MISC_FEATURE (1)..(1): X is A and G
  MISC_FEATURE (2)..(2): X is F or P
  MISC_FEATURE (3)..(3): X is T or S
  MISC_FEATURE (4)..(4): X is K, R or H for basic amino acids
  MISC_FEATURE (5)..(5): X is I, L or V
  MISC_FEATURE (6)..(6): X is F, W or Y for aromatic amino acids
  MISC_FEATURE (7)..(7): X is N or Q for amidated amino acids
  MISC_FEATURE (8)..(8): X is F or P
  MISC_FEATURE (9)..(9): X is T or S
  MISC_FEATURE (10)..(10): X is GabaX for X2X3 or X3X2 or X2X3 or X3X2 or X3X3 or X2X2
  MISC_FEATURE (11)..(11): X is I, L or V
  MISC_FEATURE (12)..(12): X is D and E for acidic amino acids
  MISC_FEATURE (13)..(13): X is M or Nle (Norleucine)
  MISC_FEATURE (14)..(14): X is A and G
  MISC_FEATURE (15)..(15): X is K, R or H for basic amino acids
  MISC_FEATURE (16)..(16): X is I, L or V
  MISC_FEATURE (17)..(17): X is I, L or V
  MISC_FEATURE (18)..(18): X is I, L or V
  MISC_FEATURE (19)..(19): X is D and E for acidic amino acids
XXXXXXXXXXXXXXXXXXX

SEQ ID NO: 667 - protein, 19 aa, Artificial
  Completely synthesized peptide construct
  MISC_FEATURE (1)..(1): X is A and G
  MISC_FEATURE (2)..(2): X is F or P
  MISC_FEATURE (3)..(3): X is T or S
  MISC_FEATURE (4)..(4): X is K, R or H for basic amino acids
  MISC_FEATURE (5)..(5): X is I, L or V
  MISC_FEATURE (6)..(6): X is F, W or Y for aromatic amino acids
  MISC_FEATURE (7)..(7): X is N or Q for amidated amino acids
  MISC_FEATURE (8)..(8): X is F or P
  MISC_FEATURE (9)..(9): X is T or S
  MISC_FEATURE (10)..(10): X is I, L or V
  MISC_FEATURE (11)..(11): X is GabaX for X2X3 or X3X2 or X2X3 or X3X2 or X3X3 or X2X2
  MISC_FEATURE (12)..(12): X is D and E for acidic amino acids
  MISC_FEATURE (13)..(13): X is M or Nle (Norleucine)
  MISC_FEATURE (14)..(14): X is A and G
  MISC_FEATURE (15)..(15): X is K, R or H for basic amino acids
  MISC_FEATURE (16)..(16): X is I, L or V
  MISC_FEATURE (17)..(17): X is I, L or V
  MISC_FEATURE (18)..(18): X is I, L or V
  MISC_FEATURE (19)..(19): X is D and E for acidic amino acids
XXXXXXXXXXXXXXXXXXX

SEQ ID NO: 668 - protein, 19 aa, Artificial
  Completely synthesized peptide construct
  MISC_FEATURE (1)..(1): X is A and G
  MISC_FEATURE (2)..(2): X is F or P
  MISC_FEATURE (3)..(3): X is T or S
  MISC_FEATURE (4)..(4): X is K, R or H for basic amino acids
  MISC_FEATURE (5)..(5): X is I, L or V
  MISC_FEATURE (6)..(6): X is F, W or Y for aromatic amino acids
  MISC_FEATURE (7)..(7): X is N or Q for amidated amino acids
  MISC_FEATURE (8)..(8): X is F or P
  MISC_FEATURE (9)..(9): X is T or S
  MISC_FEATURE (10)..(10): X is I, L or V
  MISC_FEATURE (11)..(11): X is I, L or V
  MISC_FEATURE (12)..(12): X is GabaX for X2X3 or X3X2 or X2X3 or X3X2 or X3X3 or X2X2
  MISC_FEATURE (13)..(13): X is M or Nle (Norleucine)
  MISC_FEATURE (14)..(14): X is A and G
  MISC_FEATURE (15)..(15): X is K, R or H for basic amino acids
  MISC_FEATURE (16)..(16): X is I, L or V
  MISC_FEATURE (17)..(17): X is I, L or V
  MISC_FEATURE (18)..(18): X is I, L or V
  MISC_FEATURE (19)..(19): X is D and E for basic amino acids
XXXXXXXXXXXXXXXXXXX

SEQ ID NO: 669 - protein, 19 aa, Artificial
  Completely synthesized peptide construct
  MISC_FEATURE (1)..(1): X is A and G
  MISC_FEATURE (2)..(2): X is F or P
  MISC_FEATURE (3)..(3): X is T or S
  MISC_FEATURE (4)..(4): X is K, R or H for basic amino acids
  MISC_FEATURE (5)..(5): X is I, L or V
  MISC_FEATURE (6)..(6): X is F, W or Y for aromatic amino acids
  MISC_FEATURE (7)..(7): X is N or Q for amidated amino acids
  MISC_FEATURE (8)..(8): X is F or P
  MISC_FEATURE (9)..(9): X is T or S
  MISC_FEATURE (10)..(10): X is I, L or V
  MISC_FEATURE (11)..(11): X is I, L or V
  MISC_FEATURE (12)..(12): X is I, L or V
  MISC_FEATURE (13)..(13): X is D and E for acidic amino acids
  MISC_FEATURE (14)..(14): X is M or Nle (Norleucine)
  MISC_FEATURE (15)..(15): X is A and G
  MISC_FEATURE (16)..(16): X is K, R or H for basic amino acids
  MISC_FEATURE (17)..(17): X is GabaX for X2X3 or X3X2 or X2X3 or X3X2 or X3X3 or X2X2
  MISC_FEATURE (18)..(18): X is I, L or V
  MISC_FEATURE (19)..(19): X is D and E for acidic amino acids
XXXXXXXXXXXXXXXXXXX

SEQ ID NO: 670 - protein, 19 aa, Artificial
  Completely synthesized peptide construct
  MISC_FEATURE (1)..(1): X is A and G
  MISC_FEATURE (2)..(2): X is F or P
  MISC_FEATURE (3)..(3): X is T or S
  MISC_FEATURE (4)..(4): X is K, R or H for basic amino acids
  MISC_FEATURE (5)..(5): X is I, L or V
  MISC_FEATURE (6)..(6): X is F, W or Y for aromatic amino acids
  MISC_FEATURE (7)..(7): X is N or Q for amidated amino acids
  MISC_FEATURE (8)..(8): X is F or P
  MISC_FEATURE (9)..(9): X is T or S
  MISC_FEATURE (10)..(10): X is I, L or V
  MISC_FEATURE (11)..(11): X is I, L or V
  MISC_FEATURE (12)..(12): X is I, L or V
  MISC_FEATURE (13)..(13): X is D and E for acidic amino acids
  MISC_FEATURE (14)..(14): X is M or Nle (Norleucine)
  MISC_FEATURE (15)..(15): X is A and G
  MISC_FEATURE (16)..(16): X is K, R or H for basic amino acids
  MISC_FEATURE (17)..(17): X is I, L or V
  MISC_FEATURE (18)..(18): X is GabaX for X2X3 or X3X2 or X2X3 or X3X2 or X3 X3 or X2X2
  MISC_FEATURE (19)..(19): X is D and E for acidic amino acids
XXXXXXXXXXXXXXXXXXX

SEQ ID NO: 671 - protein, 19 aa, Artificial
  Completely synthesized peptide construct
  MISC_FEATURE (1)..(1): X is A and G
  MISC_FEATURE (2)..(2): X is F or P
  MISC_FEATURE (3)..(3): X is T or S
  MISC_FEATURE (4)..(4): X is K, R or H for basic amino acids
  MISC_FEATURE (5)..(5): X is I, L or V
  MISC_FEATURE (6)..(6): X is F, W or Y for aromatic amino acids
  MISC_FEATURE (7)..(7): X is N or Q for amidated amino acids
  MISC_FEATURE (8)..(8): X is F or P
  MISC_FEATURE (9)..(9): X is T or S
  MISC_FEATURE (10)..(10): X is I, L or V
  MISC_FEATURE (11)..(11): X is I, L or V
  MISC_FEATURE (12)..(12): X is I, L or V
  MISC_FEATURE (13)..(13): X is D and E for acidic amino acids
  MISC_FEATURE (14)..(14): X is M or Nle (Norleucine)
  MISC_FEATURE (15)..(15): X is A and G
  MISC_FEATURE (16)..(16): X is K, R or H for basic amino acids
  MISC_FEATURE (17)..(17): X is I, L or V
  MISC_FEATURE (18)..(18): X is I, L or V
  MISC_FEATURE (19)..(19): X is GabaX for X2X3 or X3X2 or X2X3 or X3X2 or X3X3 or X2X2
XXXXXXXXXXXXXXXXXXX

SEQ ID NO: 672 - protein, 18 aa, Artificial
  Completely synthesized peptide construct
  MISC_FEATURE (1)..(1): X is A and G
  MISC_FEATURE (2)..(2): X is F or P
  MISC_FEATURE (3)..(3): X is T or S
  MISC_FEATURE (4)..(4): X is K, R or H for basic amino acids
  MISC_FEATURE (5)..(5): X is I, L or V
  MISC_FEATURE (6)..(6): X is F, W or Y for aromatic amino acids
  MISC_FEATURE (7)..(7): X is N or Q for amidated amino acids
  MISC_FEATURE (8)..(8): X is T or S
  MISC_FEATURE (9)..(9): X is I, L or V
  MISC_FEATURE (10)..(10): X is I, L or V
  MISC_FEATURE (11)..(11): X is I, L or V
  MISC_FEATURE (12)..(12): X is D and E for acidic amino acids
  MISC_FEATURE (13)..(13): X is D and E for acidic amino acids
  MISC_FEATURE (14)..(14): X is M or Nle (Norleucine)
  MISC_FEATURE (15)..(15): X is A and G
  MISC_FEATURE (16)..(16): X is K, R or H for basic amino acids
  MISC_FEATURE (17)..(17): X is I, L or V
  MISC_FEATURE (18)..(18): X is 5-aminopentanoic acid for replacement of 3 or 4 amino acids of X2 and X3
XXXXXXXXXXXXXXXXXX

SEQ ID NO: 673 - protein, 18 aa, Artificial
  Completely synthesized peptide construct
  MISC_FEATURE (1)..(1): X is A and G
  MISC_FEATURE (2)..(2): X is F or P
  MISC_FEATURE (3)..(3): X is T or S
  MISC_FEATURE (4)..(4): X is K, R or H for basic amino acids
  MISC_FEATURE (5)..(5): X is I, L or V
  MISC_FEATURE (6)..(6): X is F, W or Y for aromatic amino acids
  MISC_FEATURE (7)..(7): X is N or Q for amidated amino acids
  MISC_FEATURE (8)..(8): X is F or P
  MISC_FEATURE (9)..(9): X is T or S
  MISC_FEATURE (10)..(10): X is I, L or V
  MISC_FEATURE (11)..(11): X is I, L or V
  MISC_FEATURE (12)..(12): X is I, L or V
  MISC_FEATURE (13)..(13): X is D and E for acidic amino acids
  MISC_FEATURE (14)..(14): X is M or Nle (Norleucine)
  MISC_FEATURE (15)..(15): X is A and G
  MISC_FEATURE (16)..(16): X is K, R or H for basic amino acids
  MISC_FEATURE (17)..(17): X is 5-aminopentanoic acid for replacement of 3 or 4 amino acids of X2 or X3
  MISC_FEATURE (18)..(18): X is D and E for acidic amino acids
XXXXXXXXXXXXXXXXXX

SEQ ID NO: 674 - protein, 18 aa, Artificial
  Completely synthesized peptide construct
  MISC_FEATURE (1)..(1): X is A and G
  MISC_FEATURE (2)..(2): X is F or P
  MISC_FEATURE (3)..(3): X is T or S
  MISC_FEATURE (4)..(4): X is K,  R or H for basic amino acids
  MISC_FEATURE (5)..(5): X is I, L or V
  MISC_FEATURE (6)..(6): X is F, W or Y for aromatic amino acids
  MISC_FEATURE (7)..(7): X is N or Q for amidated amino acids
  MISC_FEATURE (8)..(8): X is F or P
  MISC_FEATURE (9)..(9): X is T or S
  MISC_FEATURE (10)..(10): X is 5-aminopentanoic acid for replacement of 3 or 4 amino acids of X2 and X3
  MISC_FEATURE (11)..(11): X is D and E for acidic amino acids
  MISC_FEATURE (12)..(12): X is M or Nle (Norleucine)
  MISC_FEATURE (13)..(13): X is A and G
  MISC_FEATURE (14)..(14): X is K, R or H for basic amino acids
  MISC_FEATURE (15)..(15): X is I, L or V
  MISC_FEATURE (16)..(16): X is I, L or V
  MISC_FEATURE (17)..(17): X is I, L or V
  MISC_FEATURE (18)..(18): X is D and E for acidic amino acids
XXXXXXXXXXXXXXXXXX

SEQ ID NO: 675 - protein, 17 aa, Artificial
  Completely synthesized peptide construct
  MISC_FEATURE (1)..(1): X is A and G
  MISC_FEATURE (2)..(2): X is F or P
  MISC_FEATURE (3)..(3): X is T or S
  MISC_FEATURE (4)..(4): X is K, R or H for basic amino acids
  MISC_FEATURE (5)..(5): X is I, L or V
  MISC_FEATURE (6)..(6): X is F, W or Y for aromatic amino acids
  MISC_FEATURE (7)..(7): X is N or Q for amidated amino acids
  MISC_FEATURE (8)..(8): X is F or P
  MISC_FEATURE (9)..(9): X is T or S
  MISC_FEATURE (10)..(10): X is 5-aminopentanoic acid for replacement of 3 or 4 amino acids of X2 and X3
  MISC_FEATURE (11)..(11): X is M or Nle (Norleucine)
  MISC_FEATURE (12)..(12): X is A and G
  MISC_FEATURE (13)..(13): X is K, R or H for basic amino acids
  MISC_FEATURE (14)..(14): X is I, L or V
  MISC_FEATURE (15)..(15): X is I, L or V
  MISC_FEATURE (16)..(16): X is I, L or V
  MISC_FEATURE (17)..(17): X is D and E for acidic amino acids
XXXXXXXXXXXXXXXXX

SEQ ID NO: 676 - protein, 18 aa, Artificial
  Completely synthesized peptide construct
  MISC_FEATURE (1)..(1): X is A and G
  MISC_FEATURE (2)..(2): X is F or P
  MISC_FEATURE (3)..(3): X is T or S
  MISC_FEATURE (4)..(4): X is K, R or H for basic amino acids
  MISC_FEATURE (5)..(5): X is I, L or V
  MISC_FEATURE (6)..(6): X is F, W or Y for aromatic amino acids
  MISC_FEATURE (7)..(7): X is N or Q for amidated amino acids
  MISC_FEATURE (8)..(8): X is F or P
  MISC_FEATURE (9)..(9): X is T or S
  MISC_FEATURE (10)..(10): X is I, L or V
  MISC_FEATURE (11)..(11): X is 5-aminopentanoic acid for replacement of 3 or 4 amino acids of X2 and X3
  MISC_FEATURE (12)..(12): X is M or Nle (Norleucine)
  MISC_FEATURE (13)..(13): X is A and G
  MISC_FEATURE (14)..(14): X is K, R or H for basic amino acids
  MISC_FEATURE (15)..(15): X is I, L or V
  MISC_FEATURE (16)..(16): X is I, L or V
  MISC_FEATURE (17)..(17): X is I, L or V
  MISC_FEATURE (18)..(18): X is D and E for acidic amino acids
XXXXXXXXXXXXXXXXXX

SEQ ID NO: 677 - protein, 19 aa, Artificial
  Completely synthesized peptide construct
  MISC_FEATURE (1)..(1): X is A and G
  MISC_FEATURE (2)..(2): X is F or P
  MISC_FEATURE (3)..(3): X is T or S
  MISC_FEATURE (4)..(4): X is K, R or H for basic amino acids
  MISC_FEATURE (5)..(5): X is I, L or V
  MISC_FEATURE (6)..(6): X is F, W or Y for aromatic amino acids
  MISC_FEATURE (7)..(7): X is N or Q for amidated amino acids
  MISC_FEATURE (8)..(8): X is F or P
  MISC_FEATURE (9)..(9): X is T or S
  MISC_FEATURE (10)..(10): X is GabaX for X2X3 or X3X2 or X2X3 or X3X2 or X3X3 or X2X2
  MISC_FEATURE (11)..(11): X is I, L or V
  MISC_FEATURE (12)..(12): X is D and E for acidic amino acids
  MISC_FEATURE (13)..(13): X is M or Nle (Norleucine)
  MISC_FEATURE (14)..(14): X is A and G
  MISC_FEATURE (15)..(15): X is K, R or H for basic amino acids
  MISC_FEATURE (16)..(16): X is I, L or V
  MISC_FEATURE (17)..(17): X is I, L or V
  MISC_FEATURE (18)..(18): X is I, L or V
  MISC_FEATURE (19)..(19): X is D and E for acidic amino acids
XXXXXXXXXXXXXXXXXXX

SEQ ID NO: 678 - protein, 19 aa, Artificial
  Completely synthesized peptide construct
  MISC_FEATURE (1)..(1): X is A and G
  MISC_FEATURE (2)..(2): X is F or P
  MISC_FEATURE (3)..(3): X is T or S
  MISC_FEATURE (4)..(4): X is K, R or H for basic amino acids
  MISC_FEATURE (5)..(5): X is I, L or V
  MISC_FEATURE (6)..(6): X is F, W or Y for aromatic amino acids
  MISC_FEATURE (7)..(7): X is N or Q for amidated amino acids
  MISC_FEATURE (8)..(8): X is F or P
  MISC_FEATURE (9)..(9): X is T or S
  MISC_FEATURE (10)..(10): X is I, L or V
  MISC_FEATURE (11)..(11): X is GabaX for X2X3 or X3X2 or X2X3 or X3X2 or X3X3 or X2X2
  MISC_FEATURE (12)..(12): X is D and E for acidic amino acids
  MISC_FEATURE (13)..(13): X is M or Nle (Norleucine)
  MISC_FEATURE (14)..(14): X is A and G
  MISC_FEATURE (15)..(15): X is K, R or H for basic amino acids
  MISC_FEATURE (16)..(16): X is I, L or V
  MISC_FEATURE (17)..(17): X is I, L or V
  MISC_FEATURE (18)..(18): X is I, L or V
  MISC_FEATURE (19)..(19): X is D and E for acidic amino acids
XXXXXXXXXXXXXXXXXXX

SEQ ID NO: 679 - protein, 19 aa, Artificial
  Completely synthesized peptide construct
  MISC_FEATURE (1)..(1): X is A and G
  MISC_FEATURE (2)..(2): X is F or P
  MISC_FEATURE (3)..(3): X is T or S
  MISC_FEATURE (4)..(4): X is K, R or H for basic amino acids
  MISC_FEATURE (5)..(5): X is I, L or V
  MISC_FEATURE (6)..(6): X is F, W or Y for aromatic amino acids
  MISC_FEATURE (7)..(7): X is N or Q for amidated amino acids
  MISC_FEATURE (8)..(8): X is F or P
  MISC_FEATURE (9)..(9): X is T or S
  MISC_FEATURE (10)..(10): X is I, L or V
  MISC_FEATURE (11)..(11): X is I, L or V
  MISC_FEATURE (12)..(12): X is GabaX for X2X3 or X3X2 or X2X3 or X3X2 or X3X3 or X2X2
  MISC_FEATURE (13)..(13): X is M or Nle (Norleucine)
  MISC_FEATURE (14)..(14): X is A and G
  MISC_FEATURE (15)..(15): X is K, R or H for basic amino acids
  MISC_FEATURE (16)..(16): X is I, L or V
  MISC_FEATURE (17)..(17): X is I, L or V
  MISC_FEATURE (18)..(18): X is I, L or V
  MISC_FEATURE (19)..(19): X is D and E for acidic amino acids
XXXXXXXXXXXXXXXXXXX

SEQ ID NO: 680 - protein, 19 aa, Artificial
  Completely synthesized peptide construct
  MISC_FEATURE (1)..(1): X is A and G
  MISC_FEATURE (2)..(2): X is F or P
  MISC_FEATURE (3)..(3): X is T or S
  MISC_FEATURE (4)..(4): X is K, R or H for basic amino acids
  MISC_FEATURE (5)..(5): X is I, L or V
  MISC_FEATURE (6)..(6): X is F, W or Y for aromatic amino acids
  MISC_FEATURE (7)..(7): X is N or Q for amidated amino acids
  MISC_FEATURE (8)..(8): X is F or P
  MISC_FEATURE (9)..(9): X is T or S
  MISC_FEATURE (10)..(10): X is I, L or V
  MISC_FEATURE (11)..(11): X is I, L or V
  MISC_FEATURE (12)..(12): X is I, L or V
  MISC_FEATURE (13)..(13): X is D and E for acidic amino acids
  MISC_FEATURE (14)..(14): X is M or Nle (Norleucine)
  MISC_FEATURE (15)..(15): X is A and G
  MISC_FEATURE (16)..(16): X is K, R or H for basic amino acids
  MISC_FEATURE (17)..(17): X is GabaX for X2X3 or X3X2 or X2X3 or X3X2 or X3X3 or X2X2
  MISC_FEATURE (18)..(18): X is I, L or V
  MISC_FEATURE (19)..(19): X is D and E for acidic amino acids
XXXXXXXXXXXXXXXXXXX

SEQ ID NO: 681 - protein, 19 aa, Artificial
  Completely synthesized peptide construct
  MISC_FEATURE (1)..(1): X is A and G
  MISC_FEATURE (2)..(2): X is F or P
  MISC_FEATURE (3)..(3): X is T or S
  MISC_FEATURE (4)..(4): X is K, R or H for basic amino acids
  MISC_FEATURE (5)..(5): X is I, L or V
  MISC_FEATURE (6)..(6): X is F, W or Y for aromatic amino acids
  MISC_FEATURE (7)..(7): X is N or Q for amidated amino acids
  MISC_FEATURE (8)..(8): X is F or P
  MISC_FEATURE (9)..(9): X is T or S
  MISC_FEATURE (10)..(10): X is I, L or V
  MISC_FEATURE (11)..(11): X is I, L or V
  MISC_FEATURE (12)..(12): X is I, L or V
  MISC_FEATURE (13)..(13): X is D and E for acidic amino acids
  MISC_FEATURE (14)..(14): X is M or Nle (Norleucine)
  MISC_FEATURE (15)..(15): X is A and G
  MISC_FEATURE (16)..(16): X is K, R or H for basic amino acids
  MISC_FEATURE (17)..(17): X is I, L or V
  MISC_FEATURE (18)..(18): X is GabaX for X2X3 or X3X2 or X2X3 or X3X2 or X3X3 or X2X2
  MISC_FEATURE (19)..(19): X is D and E for acidic amino acids
XXXXXXXXXXXXXXXXXXX

SEQ ID NO: 682 - protein, 19 aa, Artificial
  Completely synthesized peptide construct
  MISC_FEATURE (1)..(1): X is A and G
  MISC_FEATURE (2)..(2): X is F or P
  MISC_FEATURE (3)..(3): X is T or S
  MISC_FEATURE (4)..(4): X is K, R or H for basic amino acids
  MISC_FEATURE (5)..(5): X is I, L or V
  MISC_FEATURE (6)..(6): X is F, W or Y for aromatic amino acids
  MISC_FEATURE (7)..(7): X is N or Q for amidated amino acids
  MISC_FEATURE (8)..(8): X is F or P
  MISC_FEATURE (9)..(9): X is T or S
  MISC_FEATURE (10)..(10): X is I, L or V
  MISC_FEATURE (11)..(11): X is I, L or V
  MISC_FEATURE (12)..(12): X is I, L or V
  MISC_FEATURE (13)..(13): X is D and E for acidic amino acids
  MISC_FEATURE (14)..(14): X is M or Nle (Norleucine)
  MISC_FEATURE (15)..(15): X is A and G
  MISC_FEATURE (16)..(16): X is K, R or H for basic amino acids
  MISC_FEATURE (17)..(17): X is I, L or V
  MISC_FEATURE (18)..(18): X is I, L or V
  MISC_FEATURE (19)..(19): X is GabaX for X2X3 or X3X2 or X2X3 or X3X2 or X3X3 or X2X2
XXXXXXXXXXXXXXXXXXX

SEQ ID NO: 683 - protein, 20 aa, Artificial
  Completely synthesized peptide construct
  MISC_FEATURE (1)..(1): X is A and G
  MISC_FEATURE (2)..(2): X is F or P
  MISC_FEATURE (3)..(3): X is T or S
  MISC_FEATURE (4)..(4): X is K, R or H for basic amino acids
  MISC_FEATURE (5)..(5): X is I, L or V
  MISC_FEATURE (6)..(6): X is F, W or Y for aromatic amino acids
  MISC_FEATURE (7)..(7): X is N or Q for amidated amino acids
  MISC_FEATURE (8)..(8): X is F or P
  MISC_FEATURE (9)..(9): X is T or S
  MISC_FEATURE (10)..(10): X is I, L or V
  MISC_FEATURE (11)..(11): X is I, L or V
  MISC_FEATURE (12)..(12): X is I, L or V
  MISC_FEATURE (13)..(13): X is D and E for acidic amino acids
  MISC_FEATURE (14)..(14): X is M or Nle (Norleucine)
  MISC_FEATURE (15)..(15): X is A and G
  MISC_FEATURE (16)..(16): X is K, R or H for basic amino acids
  MISC_FEATURE (17)..(17): X is I, L or V
  MISC_FEATURE (18)..(18): X is I, L or V
  MISC_FEATURE (19)..(19): X is I, L or V
  MISC_FEATURE (20)..(20): X is D and E for acidic amino acids
XXXXXXXXXXXXXXXXXXXX

SEQ ID NO: 684 - protein, 19 aa, Artificial
  Completely synthesized peptide construct
  MISC_FEATURE (1)..(1): X is A and G
  MISC_FEATURE (2)..(2): X is F or P
  MISC_FEATURE (3)..(3): X is T or S
  MISC_FEATURE (4)..(4): X is K, R or H for basic amino acids
  MISC_FEATURE (5)..(5): X is I, L or V
  MISC_FEATURE (6)..(6): X is F, W or Y for aromatic amino acids
  MISC_FEATURE (7)..(7): X is N or Q for amidated amino acids
  MISC_FEATURE (8)..(8): X is F or P
  MISC_FEATURE (9)..(9): X is T or S
  MISC_FEATURE (10)..(10): X is GabaX for X2X3 or X3X2 or X2X3 or X3X2 or X3X3 or X2X2
  MISC_FEATURE (11)..(11): X is I, L or V
  MISC_FEATURE (12)..(12): X is D and E for acidic amino acids
  MISC_FEATURE (13)..(13): X is M or Nle (Norleucine)
  MISC_FEATURE (14)..(14): X is A and G
  MISC_FEATURE (15)..(15): X is K, R or H for basic amino acids
  MISC_FEATURE (16)..(16): X is I, L or V
  MISC_FEATURE (17)..(17): X is I, L or V
  MISC_FEATURE (18)..(18): X is I, L or V
  MISC_FEATURE (19)..(19): X is D and E for acidic amino acids
XXXXXXXXXXXXXXXXXXX

SEQ ID NO: 685 - protein, 19 aa, Artificial
  Completely synthesized peptide construct
  MISC_FEATURE (1)..(1): X is A and G
  MISC_FEATURE (2)..(2): X is F or P
  MISC_FEATURE (3)..(3): X is T or S
  MISC_FEATURE (4)..(4): X is K, R or H for basic amino acids
  MISC_FEATURE (5)..(5): X is I, L or V
  MISC_FEATURE (6)..(6): X is F, W or Y for aromatic amino acids
  MISC_FEATURE (7)..(7): X is N or Q for amidated amino acids
  MISC_FEATURE (8)..(8): X is F or P
  MISC_FEATURE (9)..(9): X is T or S
  MISC_FEATURE (10)..(10): X is I, L or V
  MISC_FEATURE (11)..(11): X is GabaX for X2X3 or X3X2 or X2X3 or X3X2 or X3X3 or X2X2
  MISC_FEATURE (12)..(12): X is D and E for acidic amino acids
  MISC_FEATURE (13)..(13): X is M or Nle (Norleucine)
  MISC_FEATURE (14)..(14): X is A and G
  MISC_FEATURE (15)..(15): X is K, R or H for basic amino acids
  MISC_FEATURE (16)..(16): X is I, L or V
  MISC_FEATURE (17)..(17): X is I, L or V
  MISC_FEATURE (18)..(18): X is I, L or V
  MISC_FEATURE (19)..(19): X is D and E for acidic amino acids
XXXXXXXXXXXXXXXXXXX

SEQ ID NO: 686 - protein, 19 aa, Artificial
  Completely synthesized peptide construct
  MISC_FEATURE (1)..(1): X is A and G
  MISC_FEATURE (2)..(2): X is F or P
  MISC_FEATURE (3)..(3): X is T or S
  MISC_FEATURE (4)..(4): X is K, R or H for basic amino acids
  MISC_FEATURE (5)..(5): X is I, L or V
  MISC_FEATURE (6)..(6): X is F, W or Y for aromatic amino acids
  MISC_FEATURE (7)..(7): X is N or Q for amidated amino acids
  MISC_FEATURE (8)..(8): X is F or P
  MISC_FEATURE (9)..(9): X is T or S
  MISC_FEATURE (10)..(10): X is I, L or V
  MISC_FEATURE (11)..(11): X is I, L or V
  MISC_FEATURE (12)..(12): X is GabaX for X2X3 or X3X2 or X2X3 or X3X2 or X3X3 or X2X2
  MISC_FEATURE (13)..(13): X is M or Nle (Norleucine)
  MISC_FEATURE (14)..(14): X is A and G
  MISC_FEATURE (15)..(15): X is A and G
  MISC_FEATURE (16)..(16): X is I, L or V
  MISC_FEATURE (17)..(17): X is I, L or V
  MISC_FEATURE (18)..(18): X is I, L or V
  MISC_FEATURE (19)..(19): X is D and E for acidic amino acids
XXXXXXXXXXXXXXXXXXX

SEQ ID NO: 687 - protein, 19 aa, Artificial
  Completely synthesized peptide construct
  MISC_FEATURE (1)..(1): X is F or P
  MISC_FEATURE (1)..(1): X is A and G
  MISC_FEATURE (2)..(2): X is F or P
  MISC_FEATURE (3)..(3): X is T or S
  MISC_FEATURE (4)..(4): X is K, R or H for basic amino acids
  MISC_FEATURE (5)..(5): X is I, L or V
  MISC_FEATURE (6)..(6): X is F, W or Y for aromatic amino acids
  MISC_FEATURE (7)..(7): X is N or Q for amidated amino acids
  MISC_FEATURE (8)..(8): X is F or P
  MISC_FEATURE (9)..(9): X is T or S
  MISC_FEATURE (10)..(10): X is I, L or V
  MISC_FEATURE (11)..(11): X is I, L or V
  MISC_FEATURE (12)..(12): X is I, L or V
  MISC_FEATURE (13)..(13): X is D and E for acidic amino acids
  MISC_FEATURE (14)..(14): X is M or Nle (Norleucine)
  MISC_FEATURE (15)..(15): X is A and G
  MISC_FEATURE (16)..(16): X is K, R or H for basic amino acids
  MISC_FEATURE (17)..(17): X is GabaX for X2X3 or X3X2 or X2X3 or X3X2 or X3X3 or X2X2
  MISC_FEATURE (18)..(18): X is I, L or V
  MISC_FEATURE (19)..(19): X is D and E for acidic amino acids
XXXXXXXXXXXXXXXXXXX

SEQ ID NO: 688 - protein, 19 aa, Artificial
  Completely synthesized peptide construct
  MISC_FEATURE (1)..(1): X is A and G
  MISC_FEATURE (2)..(2): X is F or P
  MISC_FEATURE (3)..(3): X is T or S
  MISC_FEATURE (4)..(4): X is K, R or H for basic amino acids
  MISC_FEATURE (5)..(5): X is I, L or V
  MISC_FEATURE (6)..(6): X is F, W or Y for aromatic amino acids
  MISC_FEATURE (7)..(7): X is N or Q for amidated amino acids
  MISC_FEATURE (8)..(8): X is F or P
  MISC_FEATURE (9)..(9): X is T or S
  MISC_FEATURE (10)..(10): X is I, L or V
  MISC_FEATURE (11)..(11): X is I, L or V
  MISC_FEATURE (12)..(12): X is I, L or V
  MISC_FEATURE (13)..(13): X is D and E for acidic amino acids
  MISC_FEATURE (14)..(14): X is M or Nle (Norleucine)
  MISC_FEATURE (15)..(15): X is A and G
  MISC_FEATURE (16)..(16): X is K, R or H for basic amino acids
  MISC_FEATURE (17)..(17): X is I, L or V
  MISC_FEATURE (18)..(18): X is GabaX for X2X3 or X3X2 or X2X3 or X3X2 or X3X3 or X2X2
  MISC_FEATURE (19)..(19): X is D and E for acidic amino acids
XXXXXXXXXXXXXXXXXXX

SEQ ID NO: 689 - protein, 19 aa, Artificial
  Completely synthesized peptide construct
  MISC_FEATURE (1)..(1): X is A and G
  MISC_FEATURE (2)..(2): X is F or P
  MISC_FEATURE (3)..(3): X is T or S
  MISC_FEATURE (4)..(4): X is K, R or H for basic amino acids
  MISC_FEATURE (5)..(5): X is I, L or V
  MISC_FEATURE (6)..(6): X is F, W or Y for aromatic amino acids
  MISC_FEATURE (7)..(7): X is N or Q for amidated amino acids
  MISC_FEATURE (8)..(8): X is F or P
  MISC_FEATURE (9)..(9): X is T or S
  MISC_FEATURE (10)..(10): X is I, L or V
  MISC_FEATURE (11)..(11): X is I, L or V
  MISC_FEATURE (12)..(12): X is I, L or V
  MISC_FEATURE (13)..(13): X is D and E for acidic amino acids
  MISC_FEATURE (14)..(14): X is M or Nle (Norleucine)
  MISC_FEATURE (15)..(15): X is A and G
  MISC_FEATURE (16)..(16): X is K, R or H for basic amino acids
  MISC_FEATURE (17)..(17): X is I, L or V
  MISC_FEATURE (18)..(18): X is I, L or V
  MISC_FEATURE (19)..(19): X is GabaX for X2X3 or X3X2 or X2X3 or X3X2 or X3X3 or X2X2
XXXXXXXXXXXXXXXXXXX

SEQ ID NO: 690 - protein, 18 aa, Artificial
  Completely synthesized peptide construct
  MISC_FEATURE (1)..(1): X is A and G
  MISC_FEATURE (2)..(2): X is F or P
  MISC_FEATURE (3)..(3): X is K, R or H for basic amino acids
  MISC_FEATURE (4)..(4): X is I, L or V
  MISC_FEATURE (5)..(5): X is F, W or Y for aromatic amino acids
  MISC_FEATURE (6)..(6): X is F, W or Y for aromatic amino acids
  MISC_FEATURE (7)..(7): X is N or Q for amidated amino acids
  MISC_FEATURE (8)..(8): X is F or P
  MISC_FEATURE (9)..(9): X is T or S
  MISC_FEATURE (10)..(10): X is I, L or V
  MISC_FEATURE (11)..(11): X is I, L or V
  MISC_FEATURE (12)..(12): X is I, L or V
  MISC_FEATURE (13)..(13): X is D and E for acidic amino acids
  MISC_FEATURE (14)..(14): X is M or Nle (Norleucine)
  MISC_FEATURE (15)..(15): X is A and G
  MISC_FEATURE (16)..(16): X is K, R or H for basic amino acids
  MISC_FEATURE (17)..(17): X is I, L or V
  MISC_FEATURE (18)..(18): X is 5-aminopentanoic acid for replacement of 3 or 4 amino acids of X2 or X3
XXXXXXXXXXXXXXXXXX

SEQ ID NO: 691 - protein, 18 aa, Artificial
  Completely synthesized peptide construct
  MISC_FEATURE (1)..(1): X is A and G
  MISC_FEATURE (2)..(2): X is F or P
  MISC_FEATURE (3)..(3): X is T or S
  MISC_FEATURE (4)..(4): X is K, R or H for basic amino acids
  MISC_FEATURE (5)..(5): X is I, L or V
  MISC_FEATURE (6)..(6): X is F, W or Y for aromatic amino acids
  MISC_FEATURE (7)..(7): X is N or Q for amidated amino acids
  MISC_FEATURE (8)..(8): X is F or P
  MISC_FEATURE (9)..(9): X is T or S
  MISC_FEATURE (10)..(10): X is I, L or V
  MISC_FEATURE (11)..(11): X is I, L or V
  MISC_FEATURE (12)..(12): X is I, L or V
  MISC_FEATURE (13)..(13): X is D and E for acidic amino acids
  MISC_FEATURE (14)..(14): X is M or Nle (Norleucine)
  MISC_FEATURE (15)..(15): X is A and G
  MISC_FEATURE (16)..(16): X is K, R or H for basic amino acids
  MISC_FEATURE (17)..(17): X is 5-aminopentanoic acid for replacement of 3 or 4 amino acids of X2 or X3
  MISC_FEATURE (18)..(18): X is D and E for acidic amino acids
XXXXXXXXXXXXXXXXXX

SEQ ID NO: 692 - protein, 18 aa, Artificial
  Completely synthesized peptide construct
  MISC_FEATURE (1)..(1): X is A and G
  MISC_FEATURE (2)..(2): X is F or P
  MISC_FEATURE (3)..(3): X is T or S
  MISC_FEATURE (4)..(4): X is K, R or H for basic amino acids
  MISC_FEATURE (5)..(5): X is I, L or V
  MISC_FEATURE (6)..(6): X is F, W or Y for aromatic amino acids
  MISC_FEATURE (7)..(7): X is N or Q for amidated amino acids
  MISC_FEATURE (8)..(8): X is F or P
  MISC_FEATURE (9)..(9): X is T or S
  MISC_FEATURE (10)..(10): X is 5-aminopentanoic acid for replacement of 3 or 4 amino acids of X2 or X3
  MISC_FEATURE (11)..(11): X is D and E for acidic amino acids
  MISC_FEATURE (12)..(12): X is M or Nle (Norleucine)
  MISC_FEATURE (13)..(13): X is A and G
  MISC_FEATURE (14)..(14): X is K, R or H for basic amino acids
  MISC_FEATURE (15)..(15): X is I, L or V
  MISC_FEATURE (16)..(16): X is I, L or V
  MISC_FEATURE (17)..(17): X is I, L or V
  MISC_FEATURE (18)..(18): X is D and E for acidic amino acids
XXXXXXXXXXXXXXXXXX

SEQ ID NO: 693 - protein, 17 aa, Artificial
  Completely synthesized peptide construct
  MISC_FEATURE (1)..(1): X is A and G
  MISC_FEATURE (2)..(2): X is F or P
  MISC_FEATURE (3)..(3): X is T or S
  MISC_FEATURE (4)..(4): X is K, R or H for basic amino acids
  MISC_FEATURE (5)..(5): X is I, L or V
  MISC_FEATURE (6)..(6): X is F, W or Y for aromatic amino acids
  MISC_FEATURE (7)..(7): X is N or Q for amidated amino acids
  MISC_FEATURE (8)..(8): X is F or P
  MISC_FEATURE (9)..(9): X is T or S
  MISC_FEATURE (10)..(10): X is 5-aminopentanoic acid for replacement of 3 or 4 amino acids of X2 of X3
  MISC_FEATURE (11)..(11): X is M or Nle (Norleucine)
  MISC_FEATURE (12)..(12): X is A and G
  MISC_FEATURE (13)..(13): X is K, R or H for basic amino acids
  MISC_FEATURE (14)..(14): X is I, L or V
  MISC_FEATURE (15)..(15): X is I, L or V
  MISC_FEATURE (16)..(16): X is I, L or V
  MISC_FEATURE (17)..(17): X is D and E for acidic amino acids
XXXXXXXXXXXXXXXXX

SEQ ID NO: 694 - protein, 18 aa, Artificial
  Completely synthesized peptide construct
  MISC_FEATURE (1)..(1): X is A and G
  MISC_FEATURE (2)..(2): X is F or P
  MISC_FEATURE (3)..(3): X is T or S
  MISC_FEATURE (4)..(4): X is K, R or H for basic amino acids
  MISC_FEATURE (5)..(5): X is I, L or V
  MISC_FEATURE (6)..(6): X is F, W or Y for aromatic amino acids
  MISC_FEATURE (7)..(7): X is N or Q for amidated amino acids
  MISC_FEATURE (8)..(8): X is F or P
  MISC_FEATURE (9)..(9): X is T or S
  MISC_FEATURE (10)..(10): X is 5-aminopentanoic acid for replacement of 3 or 4 amino acids of X2 or X3
  MISC_FEATURE (11)..(11): X is M or Nle (Norleucine)
  MISC_FEATURE (12)..(12): X is A and G
  MISC_FEATURE (13)..(13): X is K, R or H for basic amino acids
  MISC_FEATURE (14)..(14): X is I, L or V
  MISC_FEATURE (15)..(15): X is I, L or V
  MISC_FEATURE (16)..(16): X is I, L or V
  MISC_FEATURE (17)..(17): X is I, L or V
  MISC_FEATURE (18)..(18): X is D and E for acidic amino acids
XXXXXXXXXXXXXXXXXX

SEQ ID NO: 695 - protein, 19 aa, Artificial
  Completely synthesized peptide construct
  MISC_FEATURE (1)..(1): X is A and G
  MISC_FEATURE (2)..(2): X is F or P
  MISC_FEATURE (3)..(3): X is T or S
  MISC_FEATURE (4)..(4): X is K, R or H for basic amino acids
  MISC_FEATURE (5)..(5): X is I, L or V
  MISC_FEATURE (6)..(6): X is F, W or Y for aromatic amino acids
  MISC_FEATURE (7)..(7): X is N or Q for amidated amino acids
  MISC_FEATURE (8)..(8): X is F or P
  MISC_FEATURE (9)..(9): X is T or S
  MISC_FEATURE (10)..(10): X is GabaX for X2X3 or X3X2 or X2X3 or X3X2 or X3X3 or X2X2
  MISC_FEATURE (11)..(11): X is I, L or V
  MISC_FEATURE (12)..(12): X is D and E for acidic amino acids
  MISC_FEATURE (13)..(13): X is M or Nle (Norleucine)
  MISC_FEATURE (14)..(14): X is A andG
  MISC_FEATURE (15)..(15): X is K, R or H for basic amino acids
  MISC_FEATURE (16)..(16): X is I, L or V
  MISC_FEATURE (17)..(17): X is I, L or V
  MISC_FEATURE (18)..(18): X is I, L or V
  MISC_FEATURE (19)..(19): X is D and E for acidic amino acids
XXXXXXXXXXXXXXXXXXX

SEQ ID NO: 696 - protein, 19 aa, Artificial
  Completely synthesized peptide construct
  MISC_FEATURE (1)..(1): X is A and G
  MISC_FEATURE (2)..(2): X is F or P
  MISC_FEATURE (3)..(3): X is T or S
  MISC_FEATURE (4)..(4): X is K, R or H for basic amino acids
  MISC_FEATURE (5)..(5): X is I, L or V
  MISC_FEATURE (6)..(6): X is F, W or Y for aromatic amino acids
  MISC_FEATURE (7)..(7): X is N or Q for amidated amino acids
  MISC_FEATURE (8)..(8): X is F or P
  MISC_FEATURE (9)..(9): X is T or S
  MISC_FEATURE (10)..(10): X is I, L or V
  MISC_FEATURE (11)..(11): X is GabaX for X2X3 or X3X2 or X2X3 or X3X2 or X3X3 or X2X2
  MISC_FEATURE (12)..(12): X is D and E for acidic amino acids
  MISC_FEATURE (13)..(13): X is M or Nle (Norleucine)
  MISC_FEATURE (14)..(14): X is A and G
  MISC_FEATURE (15)..(15): X is K, R or H for basic amino acids
  MISC_FEATURE (16)..(16): X is I, L or V
  MISC_FEATURE (17)..(17): X is I, L or V
  MISC_FEATURE (18)..(18): X is I, L or V
  MISC_FEATURE (19)..(19): X is D and E for acidic amino acids
XXXXXXXXXXXXXXXXXXX

SEQ ID NO: 697 - protein, 19 aa, Artificial
  Completely synthesized peptide construct
  MISC_FEATURE (1)..(1): X is A and G
  MISC_FEATURE (2)..(2): X is F or P
  MISC_FEATURE (3)..(3): X is T or S
  MISC_FEATURE (4)..(4): X is K, R or H for basic amino acids
  MISC_FEATURE (5)..(5): X is I, L or V
  MISC_FEATURE (6)..(6): X is F, W or Y for aromatic amino acids
  MISC_FEATURE (7)..(7): X is N or Q for amidated amino acids
  MISC_FEATURE (8)..(8): X is F or P
  MISC_FEATURE (9)..(9): X is T or S
  MISC_FEATURE (10)..(10): X is I, L or V
  MISC_FEATURE (11)..(11): X is I, L or V
  MISC_FEATURE (12)..(12): X is GabaX for X2X3 or X3X2 or X2X3 or X3X2 or X3X3 or X2X2
  MISC_FEATURE (13)..(13): X is M or Nle (Norleucine)
  MISC_FEATURE (14)..(14): X is A and G
  MISC_FEATURE (15)..(15): X is K, R or H for basic amino acids
  MISC_FEATURE (16)..(16): X is I, L or V
  MISC_FEATURE (17)..(17): X is I, L or V
  MISC_FEATURE (18)..(18): X is I, L or V
  MISC_FEATURE (19)..(19): X is D and E for acidic amino acids
XXXXXXXXXXXXXXXXXXX

SEQ ID NO: 698 - protein, 17 aa, Artificial
  Completely synthesized peptide construct
  MISC_FEATURE (1)..(1): X is A and G
  MISC_FEATURE (2)..(2): X is F or P
  MISC_FEATURE (3)..(3): X is T or S
  MISC_FEATURE (4)..(4): X is K, R or H for basic amino acids
  MISC_FEATURE (5)..(5): X is I, L or V
  MISC_FEATURE (6)..(6): X is F, W or Y for aromatic amino acids
  MISC_FEATURE (7)..(7): X is N or Q for amidated amino acids
  MISC_FEATURE (8)..(8): X is F or P
  MISC_FEATURE (9)..(9): X is T or S
  MISC_FEATURE (10)..(10): X is 5-aminopentanoic acid for replacement of 3 or 4 amino acids at X2 or X3
  MISC_FEATURE (11)..(11): X is D and E for acidic amino acids
  MISC_FEATURE (12)..(12): X is M or Nle (Norleucine)
  MISC_FEATURE (13)..(13): X is A and G
  MISC_FEATURE (14)..(14): X is K, R or H for basic amino acids
  MISC_FEATURE (15)..(15): X is GabaX for X2X3 or X3X2 or X2X3 or X3X2 or X3X3 or X2X2
  MISC_FEATURE (16)..(16): X is I, L or V
  MISC_FEATURE (17)..(17): X is D and E for acidic amino acids
XXXXXXXXXXXXXXXXX

SEQ ID NO: 699 - protein, 15 aa, Artificial
  Completely synthesized peptide construct
  MISC_FEATURE (1)..(1): X is A and G
  MISC_FEATURE (2)..(2): X is F or P
  MISC_FEATURE (3)..(3): X is T or S
  MISC_FEATURE (4)..(4): X is K, R or H for basic amino acids
  MISC_FEATURE (5)..(5): X is I, L or V
  MISC_FEATURE (6)..(6): X is F, W or Y for aromatic amino acids
  MISC_FEATURE (7)..(7): X is N or Q for amidated amino acids
  MISC_FEATURE (8)..(8): X is F or P
  MISC_FEATURE (9)..(9): X is T or S
  MISC_FEATURE (10)..(10): X is 5-aminopentanoic acid for replacement of 3 or 4 amino acids of X2 or X3
  MISC_FEATURE (11)..(11): X is M or Nle (Norleucine)
  MISC_FEATURE (12)..(12): X is A and G
  MISC_FEATURE (13)..(13): X is K, R or H for basic amino acids
  MISC_FEATURE (14)..(14): X is 5-aminopentanoic acid for replacement of 3 or 4 amino acids of X2 or X3
  MISC_FEATURE (15)..(15): X is D and E for acidic amino acids
XXXXXXXXXXXXXXX

SEQ ID NO: 700 - protein, 14 aa, Artificial
  Completely synthesized peptide construct
  MISC_FEATURE (1)..(1): X is A and G
  MISC_FEATURE (2)..(2): X is F or P
  MISC_FEATURE (3)..(3): X is T or S
  MISC_FEATURE (4)..(4): X is K, R or H for basic amino acids
  MISC_FEATURE (5)..(5): X is I, L or V
  MISC_FEATURE (6)..(6): X is F, W or Y for aromatic amino acids
  MISC_FEATURE (7)..(7): X is N or Q for amidated amino acids
  MISC_FEATURE (8)..(8): X is F or P
  MISC_FEATURE (9)..(9): X is T or S
  MISC_FEATURE (10)..(10): X is 5-aminopentanoic acid for replacement of 3 or 4 amino acids of X2 and X3
  MISC_FEATURE (11)..(11): X is M or Nle (Norleucine)
  MISC_FEATURE (12)..(12): X is A and G
  MISC_FEATURE (13)..(13): X is K, R or H for basic amino acids
  MISC_FEATURE (14)..(14): X is 5-aminopentanoic aacid for replacement of 3 or 4 amino acids of X2 and X3
XXXXXXXXXXXXXX

SEQ ID NO: 701 - protein, 21 aa, Artificial
  Completely synthesized peptide construct
  MISC_FEATURE (1)..(1): X is acetyl or propionyl group, D glycine or D alanine, cyclohexylalanine at amino terminus
  MISC_FEATURE (2)..(2): X is A and G
  MISC_FEATURE (3)..(3): X is F or P
  MISC_FEATURE (4)..(4): X is T or S
  MISC_FEATURE (5)..(5): X is K, R or H for basic amino acids
  MISC_FEATURE (6)..(6): X is I, L or V
  MISC_FEATURE (7)..(7): X is F, W or Y for aromatic amino acids
  MISC_FEATURE (8)..(8): X is N or Q for amidated amino acids
  MISC_FEATURE (9)..(9): X is F or P
  MISC_FEATURE (10)..(10): X is T or S
  MISC_FEATURE (11)..(11): X is I, L or V
  MISC_FEATURE (12)..(12): X is I, L or V
  MISC_FEATURE (13)..(13): X is I, L or V
  MISC_FEATURE (14)..(14): X is A and G
  MISC_FEATURE (15)..(15): X is M or Nle (Norleucine)
  MISC_FEATURE (16)..(16): X is A and G
  MISC_FEATURE (17)..(17): X is K, R or H for basic amino acids
  MISC_FEATURE (18)..(18): X is I, L or V
  MISC_FEATURE (19)..(19): X is I, L or V
  MISC_FEATURE (20)..(20): X is I, L or V
  MISC_FEATURE (21)..(21): X is D and E for acidic amino acids
XXXXXXXXXXXXXXXXXXXXX

SEQ ID NO: 702 - protein, 20 aa, Artificial
  Completely synthesized peptide construct
  MISC_FEATURE (1)..(1): X is acetyl or propionyl group, D glycine or D alanine, cyclohexylalanine at amino terminus
  MISC_FEATURE (2)..(2): X is A and G
  MISC_FEATURE (3)..(3): X is F or P
  MISC_FEATURE (4)..(4): X is T or S
  MISC_FEATURE (5)..(5): X is K, R or H for basic amino acids
  MISC_FEATURE (6)..(6): X is I, L or V
  MISC_FEATURE (7)..(7): X is F, W or Y for aromatic amino acids
  MISC_FEATURE (8)..(8): X is N or Q for amidated amino acids
  MISC_FEATURE (9)..(9): X is F or P
  MISC_FEATURE (10)..(10): X is T or S
  MISC_FEATURE (11)..(11): X is GabaX for X2X3 or X3X2 or X2X3 or X3X2 or X3X3 or X2X2
  MISC_FEATURE (12)..(12): X is I, L or V
  MISC_FEATURE (13)..(13): X is D and E for acidic amino acids
  MISC_FEATURE (14)..(14): X is M or Nle (Norleucine)
  MISC_FEATURE (15)..(15): X is A and G
  MISC_FEATURE (16)..(16): X is K, R or H for basic amino acids
  MISC_FEATURE (17)..(17): X is I, L or V
  MISC_FEATURE (18)..(18): X is I, L or V
  MISC_FEATURE (19)..(19): X is I, L or V
  MISC_FEATURE (20)..(20): X is D and E for acidic amino acids
XXXXXXXXXXXXXXXXXXXX

SEQ ID NO: 703 - protein, 20 aa, Artificial
  Completely synthesized peptide construct
  MISC_FEATURE (1)..(1): X is acetyl or propionyl group, D glycine or D alanine, cyclhexylalanine at amino terminus
  MISC_FEATURE (2)..(2): X is A and G
  MISC_FEATURE (3)..(3): X is F or P
  MISC_FEATURE (4)..(4): X is T or S
  MISC_FEATURE (5)..(5): X is K, R or H for basic amino acids
  MISC_FEATURE (6)..(6): X is I, L or V
  MISC_FEATURE (7)..(7): X is F, W or Y for aromatic amino acids
  MISC_FEATURE (8)..(8): X is N or Q for amidated amino acids
  MISC_FEATURE (9)..(9): X is F or P
  MISC_FEATURE (10)..(10): X is T or S
  MISC_FEATURE (11)..(11): X is I, L or V
  MISC_FEATURE (12)..(12): X is GabaX for X2X3 or X3X2 or X2X3 or X3X2 or X3X3 or X2X2
  MISC_FEATURE (13)..(13): X is D and E for acidic amino acids
  MISC_FEATURE (14)..(14): X is M or Nle (Norleucine)
  MISC_FEATURE (15)..(15): X is A and G
  MISC_FEATURE (16)..(16): X is K, R or H for basic amino acids
  MISC_FEATURE (17)..(17): X is I, L or V
  MISC_FEATURE (18)..(18): X is I, L or V
  MISC_FEATURE (19)..(19): X is I, L or V
  MISC_FEATURE (20)..(20): X is D and E for acidic amino acids
XXXXXXXXXXXXXXXXXXXX

SEQ ID NO: 704 - protein, 20 aa, Artificial
  Completely synthesized peptide construct
  MISC_FEATURE (1)..(1): X is acetyl or propionyl group, D glycine or D alanine, cyclohexylalanine at amino terminus
  MISC_FEATURE (2)..(2): X is A and G
  MISC_FEATURE (3)..(3): X is F or P
  MISC_FEATURE (4)..(4): X is T or S
  MISC_FEATURE (5)..(5): X is K, R or H for basic amino acids
  MISC_FEATURE (6)..(6): X is I, L or V
  MISC_FEATURE (7)..(7): X is F, W or Y for aromatic amino acids
  MISC_FEATURE (8)..(8): X is N or Q for amidated amino acids
  MISC_FEATURE (9)..(9): X is F or P
  MISC_FEATURE (10)..(10): X is T or S
  MISC_FEATURE (11)..(11): X is I, L or V
  MISC_FEATURE (12)..(12): X is I, L or V
  MISC_FEATURE (13)..(13): X is GabaX for X2X3 or X3X2 or X2X3 or X3X2 or X3X3 or X2X2
  MISC_FEATURE (14)..(14): X is M or Nle (Norleucine)
  MISC_FEATURE (15)..(15): X is A and G
  MISC_FEATURE (16)..(16): X is K, R or H for basic amino acids
  MISC_FEATURE (17)..(17): X is I, L or V
  MISC_FEATURE (18)..(18): X is I, L or V
  MISC_FEATURE (19)..(19): X is I, L or V
  MISC_FEATURE (20)..(20): X is D and E for acidic amino acids
XXXXXXXXXXXXXXXXXXXX

SEQ ID NO: 705 - protein, 20 aa, Artificial
  Completely synthesized peptide construct
  MISC_FEATURE (1)..(1): X is acetyl or propionyl group, D glycine or D alanine, cyclohexylalanine at amino terminus
  MISC_FEATURE (2)..(2): X is A and G
  MISC_FEATURE (3)..(3): X is F or P
  MISC_FEATURE (4)..(4): X is T or S
  MISC_FEATURE (5)..(5): X is K, R or H for basic amino acids
  MISC_FEATURE (6)..(6): X is I, L or V
  MISC_FEATURE (7)..(7): X is K, R or H for basic amino acids
  MISC_FEATURE (8)..(8): X is N or Q for amidated amino acids
  MISC_FEATURE (9)..(9): X is F or P
  MISC_FEATURE (10)..(10): X is T or S
  MISC_FEATURE (11)..(11): X is I, L or V
  MISC_FEATURE (12)..(12): X is I, L or V
  MISC_FEATURE (13)..(13): X is I, L or V
  MISC_FEATURE (14)..(14): X is D and E for acidic amino acids
  MISC_FEATURE (15)..(15): X is M or Nle (Norleucine)
  MISC_FEATURE (16)..(16): X is A and G
  MISC_FEATURE (17)..(17): X is K, R or H for basic amino acids
  MISC_FEATURE (18)..(18): X is I, L or V
  MISC_FEATURE (18)..(18): X is GabaX for X2X3 or X3X2 or X2X3 or X3X2 or X3X3 or X2X2
  MISC_FEATURE (19)..(19): X is I, L or V
  MISC_FEATURE (20)..(20): X is D and E for acidic amino acids
XXXXXXXXXXXXXXXXXXXX

SEQ ID NO: 706 - protein, 20 aa, Artificial
  Completely synthesized peptide construct
  MISC_FEATURE (1)..(1): X is acetyl or propionyl group, D glycine or D alanine, cyclohexylalanine at amino terminus
  MISC_FEATURE (2)..(2): X is A and G
  MISC_FEATURE (3)..(3): X is F or P
  MISC_FEATURE (4)..(4): X is T or S
  MISC_FEATURE (5)..(5): X is K, R or H for basic amino acids
  MISC_FEATURE (6)..(6): X is I, L or V
  MISC_FEATURE (7)..(7): X is F, W or Y for aromatic amino acids
  MISC_FEATURE (8)..(8): X is N or Q for amidated amino acids
  MISC_FEATURE (9)..(9): X is F or P
  MISC_FEATURE (10)..(10): X is T or S
  MISC_FEATURE (11)..(11): X is I, L or V
  MISC_FEATURE (12)..(12): X is I, L or V
  MISC_FEATURE (13)..(13): X is I, L or V
  MISC_FEATURE (14)..(14): X is D and E for acidic amino acids
  MISC_FEATURE (15)..(15): X is M or Nle (Norleucine)
  MISC_FEATURE (16)..(16): X is A and G
  MISC_FEATURE (17)..(17): X is K, R or H for basic amino acids
  MISC_FEATURE (18)..(18): X is I, L or V
  MISC_FEATURE (19)..(19): X is GabaX for X2X3 or X3X2 or X2X3 or X3X2 or X3X3 or X2X2
  MISC_FEATURE (20)..(20): X is D and E for acidic amino acids
XXXXXXXXXXXXXXXXXXXX

SEQ ID NO: 707 - protein, 20 aa, Artificial
  Completely synthesized peptide construct
  MISC_FEATURE (1)..(1): X is acetyl or propionyl group, D glycine or D alanine, cyclohexylalanine at amino terminus
  MISC_FEATURE (2)..(2): X is A and G
  MISC_FEATURE (3)..(3): X is F or P
  MISC_FEATURE (4)..(4): X is T or S
  MISC_FEATURE (5)..(5): X is K, R or H for basic amino acids
  MISC_FEATURE (6)..(6): X is I, L or V
  MISC_FEATURE (7)..(7): X is F, W or Y for aromatic amino acids
  MISC_FEATURE (8)..(8): X is N or Q for amidated amino acids
  MISC_FEATURE (9)..(9): X is F or P
  MISC_FEATURE (10)..(10): X is T or S
  MISC_FEATURE (11)..(11): X is I, L or V
  MISC_FEATURE (12)..(12): X is I, L or V
  MISC_FEATURE (13)..(13): X is I, L or V
  MISC_FEATURE (14)..(14): X is D and E for acidic amino acids
  MISC_FEATURE (15)..(15): X is M or Nle (Norleucine)
  MISC_FEATURE (16)..(16): X is A and G
  MISC_FEATURE (17)..(17): X is K, R or H for basic amino acids
  MISC_FEATURE (18)..(18): X is I, L or V
  MISC_FEATURE (19)..(19): X is I, L or V
  MISC_FEATURE (20)..(20): X is GabaX for X2X3 or X3X2 or X2X3 or X3X2 or X3X3 or X2X2
XXXXXXXXXXXXXXXXXXXX

SEQ ID NO: 708 - protein, 19 aa, Artificial
  Completely synthesized peptide construct
  MISC_FEATURE (1)..(1): X is acetyl or propionyl group, D glycine or D alanine, cyclohexylalanine at amino terminus
  MISC_FEATURE (2)..(2): X is A and G
  MISC_FEATURE (3)..(3): X is F or P
  MISC_FEATURE (4)..(4): X is T or S
  MISC_FEATURE (5)..(5): X is K, R or H for basic amino acids
  MISC_FEATURE (6)..(6): X is I, L or V
  MISC_FEATURE (7)..(7): X is F, W or Y for aromatic amino acids
  MISC_FEATURE (8)..(8): X is N or Q for amidated amino acids
  MISC_FEATURE (9)..(9): X is F or P
  MISC_FEATURE (10)..(10): X is T or S
  MISC_FEATURE (11)..(11): X is I, L or V
  MISC_FEATURE (12)..(12): X is I, L or V
  MISC_FEATURE (13)..(13): X is I, L or V
  MISC_FEATURE (14)..(14): X is D and E for acidic amino acids
  MISC_FEATURE (15)..(15): X is M or Nle (Norleucine)
  MISC_FEATURE (16)..(16): X is A and G
  MISC_FEATURE (17)..(17): X is K, R or H for basic amino acids
  MISC_FEATURE (18)..(18): X is I, L or V
  MISC_FEATURE (19)..(19): X is 5-aminopentanoic acid for replacement of 3 or 4 amino acids of X2 and X3
XXXXXXXXXXXXXXXXXXX

SEQ ID NO: 709 - protein, 19 aa, Artificial
  Completely synthesized peptide construct
  MISC_FEATURE (1)..(1): X is acetyl or propionyl group, D glycine or D alanine, cyclohexylalanine at amino terminus
  MISC_FEATURE (2)..(2): X is A and G
  MISC_FEATURE (3)..(3): X is F or P
  MISC_FEATURE (4)..(4): X is T or S
  MISC_FEATURE (5)..(5): X is K, R or H for basic amino acids
  MISC_FEATURE (6)..(6): X is I, L or V
  MISC_FEATURE (7)..(7): X is F, W or Y for aromatic amino acids
  MISC_FEATURE (8)..(8): X is N or Q for amidated amino acids
  MISC_FEATURE (9)..(9): X is F or P
  MISC_FEATURE (10)..(10): X is T or S
  MISC_FEATURE (11)..(11): X is I, L or V
  MISC_FEATURE (12)..(12): X is I, L or V
  MISC_FEATURE (13)..(13): X is I, L or V
  MISC_FEATURE (14)..(14): X is D and E for acidic amino acids
  MISC_FEATURE (15)..(15): X is M or Nle (Norleucine)
  MISC_FEATURE (16)..(16): X is A and G
  MISC_FEATURE (17)..(17): X is K, R or H for basic amino acids
  MISC_FEATURE (18)..(18): X is 5-aminopentanoic acid for replacement of 3 or 4 amino acids of X2 and X3
  MISC_FEATURE (19)..(19): X is D and E for acidic amino acids
XXXXXXXXXXXXXXXXXXX

SEQ ID NO: 710 - protein, 19 aa, Artificial
  Completely synthesized peptide construct
  MISC_FEATURE (1)..(1): X is acetyl or propionyl group, D glycine and D alanine, cyclohexylalanine at amino terminus
  MISC_FEATURE (2)..(2): X is A and G
  MISC_FEATURE (3)..(3): X is F or P
  MISC_FEATURE (4)..(4): X is T or S
  MISC_FEATURE (5)..(5): X is K, R or H for basic amino acids
  MISC_FEATURE (6)..(6): X is I, L or V
  MISC_FEATURE (7)..(7): X is F, W or Y for aromatic amino acids
  MISC_FEATURE (8)..(8): X is N or Q for amidated amino acids
  MISC_FEATURE (9)..(9): X is F or P
  MISC_FEATURE (10)..(10): X is T or S
  MISC_FEATURE (11)..(11): X is 5-aminopentanoic acid for replacement of 3 or 4 amino acids of X2 and X3
  MISC_FEATURE (12)..(12): X is D and E for acidic amino acids
  MISC_FEATURE (13)..(13): X is M or Nle (Norleucine)
  MISC_FEATURE (14)..(14): X is A and G
  MISC_FEATURE (15)..(15): X is K, R or H for basic amino acids
  MISC_FEATURE (16)..(16): X is I, L or V
  MISC_FEATURE (17)..(17): X is I, L or V
  MISC_FEATURE (18)..(18): X is I, L or V
  MISC_FEATURE (19)..(19): X is D and E for acidic amino acids
XXXXXXXXXXXXXXXXXXX

SEQ ID NO: 711 - protein, 18 aa, Artificial
  Completely synthesized peptide construct
  MISC_FEATURE (1)..(1): X is acetyl or propionyl group, D glycine or D alanine, cyclohexylalanine at amino terminus
  MISC_FEATURE (2)..(2): X is A and G
  MISC_FEATURE (3)..(3): X is F or P
  MISC_FEATURE (4)..(4): X is T or S
  MISC_FEATURE (5)..(5): X is K, R or H for basic amino acids
  MISC_FEATURE (6)..(6): X is I, L or V
  MISC_FEATURE (7)..(7): X is F, W or Y for aromatic amino acids
  MISC_FEATURE (8)..(8): X is N or Q for amidated amino acids
  MISC_FEATURE (9)..(9): X is F or P
  MISC_FEATURE (10)..(10): X is T or S
  MISC_FEATURE (11)..(11): X is 5-aminopentanoic acid for replacement of 3 or 4 amino acids of X2 and X3
  MISC_FEATURE (12)..(12): X is M or Nle (Norleucine)
  MISC_FEATURE (13)..(13): X is A and G
  MISC_FEATURE (14)..(14): X is K, R or H for basic amino acids
  MISC_FEATURE (15)..(15): X is I, L or V
  MISC_FEATURE (16)..(16): X is I, L or V
  MISC_FEATURE (17)..(17): X is I, L or V
  MISC_FEATURE (18)..(18): X is D and E for acidic amino acids
XXXXXXXXXXXXXXXXXX

SEQ ID NO: 712 - protein, 19 aa, Artificial
  Completely synthesized peptide construct
  MISC_FEATURE (1)..(1): X is acetyl or propionyl group, D glycine or D alanine, cyclohexylalanine at amino terminus
  MISC_FEATURE (2)..(2): X is A and G
  MISC_FEATURE (3)..(3): X is F or P
  MISC_FEATURE (4)..(4): X is T or S
  MISC_FEATURE (5)..(5): X is K, R or H for basic amino acids
  MISC_FEATURE (6)..(6): X is I, L or V
  MISC_FEATURE (7)..(7): X is F, W or Y for aromatic amino acids
  MISC_FEATURE (8)..(8): X is N or Q for amidated amino acids
  MISC_FEATURE (9)..(9): X is F or P
  MISC_FEATURE (10)..(10): X is T or S
  MISC_FEATURE (11)..(11): X is I, L or V
  MISC_FEATURE (12)..(12): X is 5-aminopentanoic acid for replacement of 3 or 4 amino acids of X2 and X3
  MISC_FEATURE (13)..(13): X is M or Nle (Norleucine)
  MISC_FEATURE (14)..(14): X is A and G
  MISC_FEATURE (15)..(15): X is K, R or H for basic amino acids
  MISC_FEATURE (16)..(16): X is I, L or V
  MISC_FEATURE (17)..(17): X is I, L or V
  MISC_FEATURE (18)..(18): X is I, L or V
  MISC_FEATURE (19)..(19): X is D and E for acidic amino acids
XXXXXXXXXXXXXXXXXXX

SEQ ID NO: 713 - protein, 20 aa, Artificial
  Completely synthesized peptide construct
  MISC_FEATURE (1)..(1): X is acetyl or propionyl group, D glycine or D alanine, cyclohexylalanine at amino terminus
  MISC_FEATURE (2)..(2): X is A and G
  MISC_FEATURE (3)..(3): X is F or P
  MISC_FEATURE (4)..(4): X is T or S
  MISC_FEATURE (5)..(5): X is K, R or H for basic amino acids
  MISC_FEATURE (6)..(6): X is I, L or V
  MISC_FEATURE (7)..(7): X is F, W or Y for aromatic amino acids
  MISC_FEATURE (8)..(8): X is N or Q for amidated amino acids
  MISC_FEATURE (9)..(9): X is F or P
  MISC_FEATURE (10)..(10): X is T or S
  MISC_FEATURE (11)..(11): X is GabaX for X2X3 or X3X2 or X2X3 or X3X2 or X3X3 or X2X2
  MISC_FEATURE (12)..(12): X is I, L or V
  MISC_FEATURE (13)..(13): X is D and E for acidic amino acids
  MISC_FEATURE (14)..(14): X is M or Nle (Norleucine)
  MISC_FEATURE (15)..(15): X is A and G
  MISC_FEATURE (16)..(16): X is K, R or H for basic amino acids
  MISC_FEATURE (17)..(17): X is I, L or V
  MISC_FEATURE (18)..(18): X is I, L or V
  MISC_FEATURE (19)..(19): X is I, L or V
  MISC_FEATURE (20)..(20): X is D and E for acidic amino acids
XXXXXXXXXXXXXXXXXXXX

SEQ ID NO: 714 - protein, 20 aa, Artificial
  Completely synthesized peptide construct
  MISC_FEATURE (1)..(1): X is acetyl or propionyl group, D glycine or D alanine, cyclohexylalanine at amino terminus
  MISC_FEATURE (2)..(2): X is A and G
  MISC_FEATURE (3)..(3): X is F or P
  MISC_FEATURE (4)..(4): X is T or S
  MISC_FEATURE (5)..(5): X is K, R or H for basic amino acids
  MISC_FEATURE (6)..(6): X is I, L or V
  MISC_FEATURE (7)..(7): X is F, W or Y for aromatic amino acids
  MISC_FEATURE (8)..(8): X is N or Q for amidated amino acids
  MISC_FEATURE (9)..(9): X is F or P
  MISC_FEATURE (10)..(10): X is T or S
  MISC_FEATURE (11)..(11): X is I, L or V
  MISC_FEATURE (12)..(12): X is GabaX for X2X3 or X3X2 or X2X3 or X3X2 or X3X3 or X2X2
  MISC_FEATURE (13)..(13): X is D and E for acidic amino acids
  MISC_FEATURE (14)..(14): X is M or Nle (Norleucine)
  MISC_FEATURE (15)..(15): X is A and G
  MISC_FEATURE (16)..(16): X is K, R or H for basic amino acids
  MISC_FEATURE (17)..(17): X is I, L or V
  MISC_FEATURE (18)..(18): X is I, L or V
  MISC_FEATURE (19)..(19): X is I, L or V
  MISC_FEATURE (20)..(20): X is D and E for acidic amino acids
XXXXXXXXXXXXXXXXXXXX

SEQ ID NO: 715 - protein, 20 aa, Artificial
  Completely synthesized peptide construct
  MISC_FEATURE (1)..(1): X is acetyl or propionyl group, D glycine or D alanine, cyclohexylalanine at amino terminus
  MISC_FEATURE (2)..(2): X is A and G
  MISC_FEATURE (3)..(3): X is F or P
  MISC_FEATURE (4)..(4): X is T or S
  MISC_FEATURE (5)..(5): X is K, R or H for basic amino acids
  MISC_FEATURE (6)..(6): X is I, L or V
  MISC_FEATURE (7)..(7): X is F, W or Y for aromatic amino acids
  MISC_FEATURE (8)..(8): X is N or Q for amidated amino acids
  MISC_FEATURE (9)..(9): X is F or P
  MISC_FEATURE (10)..(10): X is T or S
  MISC_FEATURE (11)..(11): X is I, L or V
  MISC_FEATURE (12)..(12): X is I, L or V
  MISC_FEATURE (13)..(13): X is GabaX for X2X3 or X3X2 or X2X3 or X3X2 or X3X3 or X2X2
  MISC_FEATURE (14)..(14): X is M or Nle (Norleucine)
  MISC_FEATURE (15)..(15): X is A and G
  MISC_FEATURE (16)..(16): X is K, R or H for basic amino acids
  MISC_FEATURE (17)..(17): X is I, L or V
  MISC_FEATURE (18)..(18): X is I, L or V
  MISC_FEATURE (19)..(19): X is I, L or V
  MISC_FEATURE (20)..(20): X is D and E for acidic amino acids
XXXXXXXXXXXXXXXXXXXX

SEQ ID NO: 716 - protein, 20 aa, Artificial
  Completely synthesized peptide construct
  MISC_FEATURE (1)..(1): X is acetyl or propionyl group, D glycine or D alanine, cyclohexylalanine at amino terminus
  MISC_FEATURE (2)..(2): X is A and G
  MISC_FEATURE (3)..(3): X is F or P
  MISC_FEATURE (4)..(4): X is T or S
  MISC_FEATURE (5)..(5): X is K, R or H for basic amino acids
  MISC_FEATURE (6)..(6): X is I, L or V
  MISC_FEATURE (7)..(7): X is F, W or Y for aromatic amino acids
  MISC_FEATURE (8)..(8): X is N or Q for amidated amino acids
  MISC_FEATURE (9)..(9): X is F or P
  MISC_FEATURE (10)..(10): X is T or S
  MISC_FEATURE (11)..(11): X is I, L or V
  MISC_FEATURE (12)..(12): X is I, L or V
  MISC_FEATURE (13)..(13): X is I, L or V
  MISC_FEATURE (14)..(14): X is D and E for acidic amino acids
  MISC_FEATURE (15)..(15): X is M or Nle (Norleucine)
  MISC_FEATURE (16)..(16): X is A and G
  MISC_FEATURE (17)..(17): X is K, R or H for basic amino acids
  MISC_FEATURE (18)..(18): X is GabaX for X2X3 or X3X2 or X2X3 or X3X2 or X3X3 or X2X2
  MISC_FEATURE (19)..(19): X is I, L or V
  MISC_FEATURE (20)..(20): X is D and E for acidic amino acids
XXXXXXXXXXXXXXXXXXXX

SEQ ID NO: 717 - protein, 20 aa, Artificial
  Completely synthesized peptide construct
  MISC_FEATURE (1)..(1): X is acetyl or propionyl group, D glycine or D alanine, cyclohexylalanine at amino terminus
  MISC_FEATURE (2)..(2): X is A and G
  MISC_FEATURE (3)..(3): X is F or P
  MISC_FEATURE (4)..(4): X is T or S
  MISC_FEATURE (5)..(5): X is K, R or H for basic amino acids
  MISC_FEATURE (6)..(6): X is I, L or V
  MISC_FEATURE (7)..(7): X is F, W or Y for aromatic amino acids
  MISC_FEATURE (8)..(8): X is N or Q for amidated amino acids
  MISC_FEATURE (9)..(9): X is F or P
  MISC_FEATURE (10)..(10): X is T or S
  MISC_FEATURE (11)..(11): X is I, L or V
  MISC_FEATURE (12)..(12): X is I, L or V
  MISC_FEATURE (13)..(13): X is I, L or V
  MISC_FEATURE (14)..(14): X is D and E for acidic amino acids
  MISC_FEATURE (15)..(15): X is M or Nle (Norleucine)
  MISC_FEATURE (16)..(16): X is A and G
  MISC_FEATURE (17)..(17): X is K, R or H for basic amino acids
  MISC_FEATURE (18)..(18): X is I, L or V
  MISC_FEATURE (19)..(19): X is GabaX for X2X3 or X3X2 or X2X3 or X3X2 or X3X3 or X2X2
  MISC_FEATURE (20)..(20): X is D and E for acidic amino acids
XXXXXXXXXXXXXXXXXXXX

SEQ ID NO: 718 - protein, 20 aa, Artificial
  Completely synthesized peptide construct
  MISC_FEATURE (1)..(1): X is acetyl or propionyl group, D glycine or D alanine, cyclohexylalanine at amino terminus
  MISC_FEATURE (2)..(2): X is A and G
  MISC_FEATURE (3)..(3): X is F or P
  MISC_FEATURE (4)..(4): X is T or S
  MISC_FEATURE (5)..(5): X is K, R or H for basic amino acids
  MISC_FEATURE (6)..(6): X is I, L or V
  MISC_FEATURE (7)..(7): X is F, W or Y for aromatic amino acids
  MISC_FEATURE (8)..(8): X is N or Q for amidated amino acids
  MISC_FEATURE (9)..(9): X is F or P
  MISC_FEATURE (10)..(10): X is T or S
  MISC_FEATURE (11)..(11): X is I, L or V
  MISC_FEATURE (12)..(12): X is I, L or V
  MISC_FEATURE (13)..(13): X is I, L or V
  MISC_FEATURE (14)..(14): X is D and E for acidic amino acids
  MISC_FEATURE (15)..(15): X is M or Nle (Norleucine)
  MISC_FEATURE (16)..(16): X is A and G
  MISC_FEATURE (17)..(17): X is K, R or H for basic amino acids
  MISC_FEATURE (18)..(18): X is I, L or V
  MISC_FEATURE (19)..(19): X is I, L or V
  MISC_FEATURE (20)..(20): X is GabaX for X2X3 or X3X2 or X2X3 or X3X2 or X3X3 or X2X2
XXXXXXXXXXXXXXXXXXXX

SEQ ID NO: 719 - protein, 21 aa, Artificial
  Completely synthesized peptide construct
  MISC_FEATURE (1)..(1): X is acetyl or propionyl group, D glycine or D alanine, cyclohexylalanine at amino terminus
  MISC_FEATURE (2)..(2): X is A and G
  MISC_FEATURE (3)..(3): X is F or P
  MISC_FEATURE (4)..(4): X is T or S
  MISC_FEATURE (5)..(5): X is K, R or H for basic amino acids
  MISC_FEATURE (6)..(6): X is I, L or V
  MISC_FEATURE (7)..(7): X is F, W or Y for aromatic amino acids
  MISC_FEATURE (8)..(8): X is N or Q for amidated amino acids
  MISC_FEATURE (9)..(9): X is F or P
  MISC_FEATURE (10)..(10): X is T or S
  MISC_FEATURE (11)..(11): X is I, L or V
  MISC_FEATURE (12)..(12): X is I, L or V
  MISC_FEATURE (13)..(13): X is I, L or V
  MISC_FEATURE (14)..(14): X is D and E for acidic amino acids
  MISC_FEATURE (15)..(15): X is M or Nle (Norleucine)
  MISC_FEATURE (16)..(16): X is A and G
  MISC_FEATURE (17)..(17): X is K, R or H for basic amino acids
  MISC_FEATURE (18)..(18): X is I, L or V
  MISC_FEATURE (19)..(19): X is I, L or V
  MISC_FEATURE (20)..(20): X is I, L or V
  MISC_FEATURE (21)..(21): X is D and E for acidic amino acids
XXXXXXXXXXXXXXXXXXXXX

SEQ ID NO: 720 - protein, 20 aa, Artificial
  Completely synthesized peptide construct
  MISC_FEATURE (1)..(1): X is acetyl or propionyl group, D glycine or D alanine, cyclohexylalanine at amino terminus
  MISC_FEATURE (2)..(2): X is A and G
  MISC_FEATURE (3)..(3): X is F or P
  MISC_FEATURE (4)..(4): X is T or S
  MISC_FEATURE (5)..(5): X is K, R or H for basic amino acids
  MISC_FEATURE (6)..(6): X is I, L or V
  MISC_FEATURE (7)..(7): X is F, W or Y for aromatic amino acids
  MISC_FEATURE (8)..(8): X is N or Q for amidated amino acids
  MISC_FEATURE (9)..(9): X is F or P
  MISC_FEATURE (10)..(10): X is T or S
  MISC_FEATURE (11)..(11): X is GabaX for X2X3 or X3X2 or X2X3 or X3X2 or X3X3 or X2X2
  MISC_FEATURE (12)..(12): X is I, L or V
  MISC_FEATURE (13)..(13): X is D and E for acidic amino acids
  MISC_FEATURE (14)..(14): X is M or Nle (Norleucine)
  MISC_FEATURE (15)..(15): X is A and G
  MISC_FEATURE (16)..(16): X is K, R or H for basic amino acids
  MISC_FEATURE (17)..(17): X is I, L or V
  MISC_FEATURE (18)..(18): X is I, L or V
  MISC_FEATURE (19)..(19): X is I, L or V
  MISC_FEATURE (20)..(20): X is D and E for acidic amino acids
XXXXXXXXXXXXXXXXXXXX

SEQ ID NO: 721 - protein, 20 aa, Artificial
  Completely synthesized peptide construct
  MISC_FEATURE (1)..(1): X is acetyl or propionyl group, D glycine or D alanine, cyclohexylalanine at amino terminus
  MISC_FEATURE (2)..(2): X is A and G
  MISC_FEATURE (3)..(3): X is F or P
  MISC_FEATURE (4)..(4): X is T or S
  MISC_FEATURE (5)..(5): X is K, R or H for basic amino acids
  MISC_FEATURE (6)..(6): X is I, L or V
  MISC_FEATURE (7)..(7): X is F, W or Y for aromatic amino acids
  MISC_FEATURE (8)..(8): X is N or Q for amidated amino acids
  MISC_FEATURE (9)..(9): X is F or P
  MISC_FEATURE (10)..(10): X is T or S
  MISC_FEATURE (11)..(11): X is I, L or V
  MISC_FEATURE (12)..(12): X is GabaX for X2X3 or X3X2 or X2X3 or X3X2 or X3X3 or X2X2
  MISC_FEATURE (13)..(13): X is D and E for acidic amino acids
  MISC_FEATURE (14)..(14): X is M or Nle (Norleucine)
  MISC_FEATURE (15)..(15): X is A and G
  MISC_FEATURE (16)..(16): X is A and G
  MISC_FEATURE (17)..(17): X is I, L or V
  MISC_FEATURE (18)..(18): X is I, L or V
  MISC_FEATURE (19)..(19): X is I, L or V
  MISC_FEATURE (20)..(20): X is D and E for acidic amino acids
XXXXXXXXXXXXXXXXXXXX

SEQ ID NO: 722 - protein, 20 aa, Artificial
  Completely synthesized peptide construct
  MISC_FEATURE (1)..(1): X is acetyl or propionyl group, D glycine or D alanine, cyclohexylalanine at amino terminus
  MISC_FEATURE (2)..(2): X is A and G
  MISC_FEATURE (3)..(3): X is F or P
  MISC_FEATURE (4)..(4): X is T or S
  MISC_FEATURE (5)..(5): X is K, R or H for basic amino acids
  MISC_FEATURE (6)..(6): X is I, L or V
  MISC_FEATURE (7)..(7): X is F, W or Y for aromatic amino acids
  MISC_FEATURE (8)..(8): X is N or Q for amidated amino acids
  MISC_FEATURE (9)..(9): X is F or P
  MISC_FEATURE (10)..(10): X is T or S
  MISC_FEATURE (11)..(11): X is I, L or V
  MISC_FEATURE (12)..(12): X is I, L or V
  MISC_FEATURE (13)..(13): X is GabaX for X2X3 or X3X2 or X2X3 or X3X2 or X3X3 or X2X2
  MISC_FEATURE (14)..(14): X is M or Nle (Norleucine)
  MISC_FEATURE (15)..(15): X is A and G
  MISC_FEATURE (16)..(16): X is K, R or H for basic amino acids
  MISC_FEATURE (17)..(17): X is I, L or V
  MISC_FEATURE (18)..(18): X is I, L or V
  MISC_FEATURE (19)..(19): X is I, L or V
  MISC_FEATURE (20)..(20): X is D and E for acidic amino acids
XXXXXXXXXXXXXXXXXXXX

SEQ ID NO: 723 - protein, 20 aa, Artificial
  Completely synthesized peptide construct
  MISC_FEATURE (1)..(1): X is acetyl or propionyl group, D glycine or D alanine, cyclohexylalanine at amino terminus
  MISC_FEATURE (2)..(2): X is A and G
  MISC_FEATURE (3)..(3): X is F or P
  MISC_FEATURE (4)..(4): X is T or S
  MISC_FEATURE (5)..(5): X is K, R or H for basic amino acids
  MISC_FEATURE (6)..(6): X is I, L or V
  MISC_FEATURE (7)..(7): X is X is F, W or Y for aromatic amino acids
  MISC_FEATURE (8)..(8): X is N or Q for amidated amino acids
  MISC_FEATURE (9)..(9): X is F or P
  MISC_FEATURE (10)..(10): X is T or S
  MISC_FEATURE (11)..(11): X is I, L or V
  MISC_FEATURE (12)..(12): X is I, L or V
  MISC_FEATURE (13)..(13): X is I, L or V
  MISC_FEATURE (14)..(14): X is D and E for acidic amino acids
  MISC_FEATURE (15)..(15): X is M or Nle (Norleucine)
  MISC_FEATURE (16)..(16): X is A and G
  MISC_FEATURE (17)..(17): X is K, R or H for basic amino acids
  MISC_FEATURE (18)..(18): X is GabaX for X2X3 or X3X2 or X2X3 or X3X2 or X3X3 or X2X2
  MISC_FEATURE (19)..(19): X is I, L or V
  MISC_FEATURE (20)..(20): X is D and E for acidic amino acids
XXXXXXXXXXXXXXXXXXXX

SEQ ID NO: 724 - protein, 20 aa, Artificial
  Completely synthesized peptide construct
  MISC_FEATURE (1)..(1): X is acetyl or propionyl group, D glycine or D alanine, cyclohexylalanine at amino terminus
  MISC_FEATURE (2)..(2): X is A and G
  MISC_FEATURE (3)..(3): X is F or P
  MISC_FEATURE (4)..(4): X is T or S
  MISC_FEATURE (5)..(5): X is K, R or H for basic amino acids
  MISC_FEATURE (6)..(6): X is I, L or V
  MISC_FEATURE (7)..(7): X is F, W or Y for aromatic amino acids
  MISC_FEATURE (8)..(8): X is N or Q for amidated amino acids
  MISC_FEATURE (9)..(9): X is F or P
  MISC_FEATURE (10)..(10): X is T or S
  MISC_FEATURE (11)..(11): X is I, L or V
  MISC_FEATURE (12)..(12): X is I, L or V
  MISC_FEATURE (13)..(13): X is I, L or V
  MISC_FEATURE (14)..(14): X is D and E for acidic amino acids
  MISC_FEATURE (15)..(15): X is M or Nle (Norleucine)
  MISC_FEATURE (16)..(16): X is A and G
  MISC_FEATURE (17)..(17): X is K, R or H for basic amino acids
  MISC_FEATURE (18)..(18): X is I, L or V
  MISC_FEATURE (19)..(19): X is GabaX for X2X3 or X3X2 or X2X3 or X3X2 or X3X3 or X2X2
  MISC_FEATURE (20)..(20): X is D and E for acidic amino acids
XXXXXXXXXXXXXXXXXXXX

SEQ ID NO: 725 - protein, 20 aa, Artificial
  Completely synthesized peptide construct
  MISC_FEATURE (1)..(1): X is acetyl or propionyl group, D glycine or D alanine, cyclohexylalanine at amino terminus
  MISC_FEATURE (2)..(2): X is A and G
  MISC_FEATURE (3)..(3): X is F or P
  MISC_FEATURE (4)..(4): X is T or S
  MISC_FEATURE (5)..(5): X is K, R or H for basic amino acids
  MISC_FEATURE (6)..(6): X is I, L or V
  MISC_FEATURE (7)..(7): X is F, W or Y for aromatic amino acids
  MISC_FEATURE (8)..(8): X is N or Q for amidated amino acids
  MISC_FEATURE (9)..(9): X is F or P
  MISC_FEATURE (10)..(10): X is T or S
  MISC_FEATURE (11)..(11): X is I, L or V
  MISC_FEATURE (12)..(12): X is I, L or V
  MISC_FEATURE (13)..(13): X is I, L or V
  MISC_FEATURE (14)..(14): X is D and E for acidic amino acids
  MISC_FEATURE (15)..(15): X is M or Nle (Norleucine)
  MISC_FEATURE (16)..(16): X is A and G
  MISC_FEATURE (17)..(17): X is K, R or H for basic amino acids
  MISC_FEATURE (18)..(18): X is I, L or V
  MISC_FEATURE (19)..(19): X is I, L or V
  MISC_FEATURE (20)..(20): X is GabaX for X2X3 or X3X2 or X2X3 or X3X2 or X3X3 or X2X2
XXXXXXXXXXXXXXXXXXXX

SEQ ID NO: 726 - protein, 19 aa, Artificial
  Completely synthesized peptide construct
  MISC_FEATURE (1)..(1): X is acetyl or propionyl group, D glycine or D alanine, cyclohexylalanine at amino terminus
  MISC_FEATURE (2)..(2): X is A and G
  MISC_FEATURE (3)..(3): X is F or P
  MISC_FEATURE (4)..(4): X is T or S
  MISC_FEATURE (5)..(5): X is K, R or H for basic amino acids
  MISC_FEATURE (6)..(6): X is I, L or V
  MISC_FEATURE (7)..(7): X is F, W or Y for aromatic amino acids
  MISC_FEATURE (8)..(8): X is N or Q for amidated amino acids
  MISC_FEATURE (9)..(9): X is F or P
  MISC_FEATURE (10)..(10): X is T or S
  MISC_FEATURE (11)..(11): X is I, L or V
  MISC_FEATURE (12)..(12): X is I, L or V
  MISC_FEATURE (13)..(13): X is I, L or V
  MISC_FEATURE (14)..(14): X is D and E for acidic amino acids
  MISC_FEATURE (15)..(15): X is M or Nle (Norleucine)
  MISC_FEATURE (16)..(16): X is A and G
  MISC_FEATURE (17)..(17): X is K, R or H for basic amino acids
  MISC_FEATURE (18)..(18): X is I, L or V
  MISC_FEATURE (19)..(19): X is 5-aminopentanoic acid for replacement of 3 or 4 amino acids of X2 and X3
XXXXXXXXXXXXXXXXXXX

SEQ ID NO: 727 - protein, 19 aa, Artificial
  Completely synthesized peptide construct
  MISC_FEATURE (1)..(1): X is acetyl or propionyl group, D glycine or D alanine, cyclohexylalanine at amino terminus
  MISC_FEATURE (2)..(2): X is A and G
  MISC_FEATURE (3)..(3): X is F or P
  MISC_FEATURE (4)..(4): X is T or S
  MISC_FEATURE (5)..(5): X is K, R or H for basic amino acids
  MISC_FEATURE (6)..(6): X is I, L or V
  MISC_FEATURE (7)..(7): X is F, W or Y for aromatic amino acids
  MISC_FEATURE (8)..(8): X is N or Q for amidated amino acids
  MISC_FEATURE (9)..(9): X is F or P
  MISC_FEATURE (10)..(10): X is T or S
  MISC_FEATURE (11)..(11): X is I, L or V
  MISC_FEATURE (12)..(12): X is I, L or V
  MISC_FEATURE (13)..(13): X is I, L or V
  MISC_FEATURE (14)..(14): X is D and E for acidic amino acids
  MISC_FEATURE (15)..(15): X is M or Nle (Norleucine)
  MISC_FEATURE (16)..(16): X is A and G
  MISC_FEATURE (17)..(17): X is K, R or H for basic amino acids
  MISC_FEATURE (18)..(18): X is 5-aminopentanoic acid for replacement of 3 or 4 amino acids of X2 and X3
  MISC_FEATURE (19)..(19): X is D and E for acidic amino acids
XXXXXXXXXXXXXXXXXXX

SEQ ID NO: 728 - protein, 19 aa, Artificial
  Completely synthesized peptide construct
  MISC_FEATURE (1)..(1): X is acetyl or propionyl group, D glycine or D alanine, cyclohexylalanine at amino terminus
  MISC_FEATURE (2)..(2): X is A and G
  MISC_FEATURE (3)..(3): X is F or P
  MISC_FEATURE (4)..(4): X is T or S
  MISC_FEATURE (5)..(5): X is K, R or H for basic amino acids
  MISC_FEATURE (6)..(6): X is I, L or V
  MISC_FEATURE (7)..(7): X is F, W or Y for aromatic amino acids
  MISC_FEATURE (8)..(8): X is N or Q for amidated amino acids
  MISC_FEATURE (9)..(9): X is F or P
  MISC_FEATURE (10)..(10): X is T or S
  MISC_FEATURE (11)..(11): X is 5-aminopentanoic acid for replacement of 3 or 4 amino acids of X2 and X3
  MISC_FEATURE (12)..(12): X is D and E for acidic amino acids
  MISC_FEATURE (13)..(13): X is M or Nle (Norleucine)
  MISC_FEATURE (14)..(14): X is A and G
  MISC_FEATURE (15)..(15): X is K, R or H for basic amino acids
  MISC_FEATURE (16)..(16): X is I, L or V
  MISC_FEATURE (17)..(17): X is I, L or V
  MISC_FEATURE (18)..(18): X is I, L or V
  MISC_FEATURE (19)..(19): X is D and E for acidic amino acids
XXXXXXXXXXXXXXXXXXX

SEQ ID NO: 729 - protein, 18 aa, Artificial
  Completely synthesized peptide construct
  MISC_FEATURE (1)..(1): X is acetyl or propionyl group, D glycine or D alanine, cyclohexylalanine at amino terminus
  MISC_FEATURE (2)..(2): X is A and G
  MISC_FEATURE (3)..(3): X is F or P
  MISC_FEATURE (4)..(4): X is T or S
  MISC_FEATURE (5)..(5): X is K, R or H for basic amino acids
  MISC_FEATURE (6)..(6): X is I, L or V
  MISC_FEATURE (7)..(7): X is F, W or Y for aromatic amino acids
  MISC_FEATURE (8)..(8): X is N or Q for amidated amino acids
  MISC_FEATURE (9)..(9): X is F or P
  MISC_FEATURE (10)..(10): X is T or S
  MISC_FEATURE (11)..(11): X is 5-aminopentanoic acid for replacement of 3 or 4 amino acids of X2 and X3
  MISC_FEATURE (12)..(12): X is M or Nle (Norleucine)
  MISC_FEATURE (13)..(13): X is A and G
  MISC_FEATURE (14)..(14): X is K, R or H for basic amino acids
  MISC_FEATURE (15)..(15): X is I, L or V
  MISC_FEATURE (16)..(16): X is I, L or V
  MISC_FEATURE (17)..(17): X is I, L or V
  MISC_FEATURE (18)..(18): X is D and E for acidic amino acids
XXXXXXXXXXXXXXXXXX

SEQ ID NO: 730 - protein, 19 aa, Artificial
  Completely synthesized peptide construct
  MISC_FEATURE (1)..(1): X is acetyl or propionyl group, D glycine or D alanine, cyclohexylalanine at amino terminus
  MISC_FEATURE (2)..(2): X is A and G
  MISC_FEATURE (3)..(3): X is F or P
  MISC_FEATURE (4)..(4): X is T or S
  MISC_FEATURE (5)..(5): X is K, R or H for basic amino acids
  MISC_FEATURE (6)..(6): X is I, L or V
  MISC_FEATURE (7)..(7): X is F, W or Y for aromatic amino acids
  MISC_FEATURE (8)..(8): X is N or Q for amidated amino acids
  MISC_FEATURE (9)..(9): X is F or P
  MISC_FEATURE (10)..(10): X is T or S
  MISC_FEATURE (11)..(11): X is I, L or V
  MISC_FEATURE (12)..(12): X is 5-aminopentanoic acid for replacement of 3 or 4 amino acids of X2 and X3
  MISC_FEATURE (13)..(13): X is M or Nle (Norleucine)
  MISC_FEATURE (14)..(14): X is A and G
  MISC_FEATURE (15)..(15): X is K, R or H for basic amino acids
  MISC_FEATURE (16)..(16): X is I, L or V
  MISC_FEATURE (17)..(17): X is I, L or V
  MISC_FEATURE (18)..(18): X is I, L or V
  MISC_FEATURE (19)..(19): X is D and E for acidic amino acids
XXXXXXXXXXXXXXXXXXX

SEQ ID NO: 731 - protein, 20 aa, Artificial
  Completely synthesized peptide construct
  MISC_FEATURE (1)..(1): X is acetyl or propionyl group, D glycine or D alanine, cyclohexylalanine at amino terminus
  MISC_FEATURE (2)..(2): X is A and G
  MISC_FEATURE (3)..(3): X is F or P
  MISC_FEATURE (4)..(4): X is T or S
  MISC_FEATURE (5)..(5): X is K, R or H for basic amino acids
  MISC_FEATURE (6)..(6): X is I, L or V
  MISC_FEATURE (7)..(7): X is F, W or Y for aromatic amino acids
  MISC_FEATURE (8)..(8): X is N or Q for amidated amino acids
  MISC_FEATURE (9)..(9): X is F or P
  MISC_FEATURE (10)..(10): X is T or S
  MISC_FEATURE (11)..(11): X is GabaX for X2X3 or X3X2 or X2X3 or X3X2 or X3X3 or X2X2
  MISC_FEATURE (12)..(12): X is I, L or V
  MISC_FEATURE (13)..(13): X is D and E for acidic amino acids
  MISC_FEATURE (14)..(14): X is M or Nle (Norleucine)
  MISC_FEATURE (15)..(15): X is A and G
  MISC_FEATURE (16)..(16): X is K, R or H for basic amino acids
  MISC_FEATURE (17)..(17): X is I, L or V
  MISC_FEATURE (18)..(18): X is I, L or V
  MISC_FEATURE (19)..(19): X is I, L or V
  MISC_FEATURE (20)..(20): X is D and E for acidic amino acids
XXXXXXXXXXXXXXXXXXXX

SEQ ID NO: 732 - protein, 20 aa, Artificial
  Completely synthesized peptide construct
  MISC_FEATURE (1)..(1): X is acetyl or propionyl group, D glycine or D alanine, cyclohexylalanine at amino terminus
  MISC_FEATURE (2)..(2): X is A and G
  MISC_FEATURE (3)..(3): X is F or P
  MISC_FEATURE (4)..(4): X is T or S
  MISC_FEATURE (5)..(5): X is K, R or H for basic amino acids
  MISC_FEATURE (6)..(6): X is I, L or V
  MISC_FEATURE (7)..(7): X is F, W or Y for aromatic amino acids
  MISC_FEATURE (8)..(8): X is N or Q for amidated amino acids
  MISC_FEATURE (9)..(9): X is F or P
  MISC_FEATURE (10)..(10): X is T or S
  MISC_FEATURE (11)..(11): X is I, L or V
  MISC_FEATURE (12)..(12): X is GabaX for X2X3 or X3X2 or X2X3 or X3X2 or X3X3 or X2X2
  MISC_FEATURE (13)..(13): X is D and E for acidic amino acids
  MISC_FEATURE (14)..(14): X is M or Nle (Norleucine)
  MISC_FEATURE (15)..(15): X is A and G
  MISC_FEATURE (16)..(16): X is K, R or H for basic amino acids
  MISC_FEATURE (17)..(17): X is I, L or V
  MISC_FEATURE (18)..(18): X is I, L or V
  MISC_FEATURE (19)..(19): X is I, L or V
  MISC_FEATURE (20)..(20): X is D and E for acidic amino acids
XXXXXXXXXXXXXXXXXXXX

SEQ ID NO: 733 - protein, 20 aa, Artificial
  Completely synthesized peptide construct
  MISC_FEATURE (1)..(1): X is acetyl or propionyl group, D glycine or D alanine, cyclohexylalanine at amino terminus
  MISC_FEATURE (2)..(2): X is A and G
  MISC_FEATURE (3)..(3): X is F or P
  MISC_FEATURE (4)..(4): X is T or S
  MISC_FEATURE (5)..(5): X is K, R or H for basic amino acids
  MISC_FEATURE (6)..(6): X is I, L or V
  MISC_FEATURE (7)..(7): X is F, W or Y for aromatic amino acids
  MISC_FEATURE (8)..(8): X is N or Q for amidated amino acids
  MISC_FEATURE (9)..(9): X is F or P
  MISC_FEATURE (10)..(10): X is T or S
  MISC_FEATURE (11)..(11): X is I, L or V
  MISC_FEATURE (12)..(12): X is I, L or V
  MISC_FEATURE (13)..(13): X is GabaX for X2X3 or X3X2 or X2X3 or X3X2 or X3X3 or X2X2
  MISC_FEATURE (14)..(14): X is M or Nle (Norleucine)
  MISC_FEATURE (15)..(15): X is A and G
  MISC_FEATURE (16)..(16): X is K, R or H for basic amino acids
  MISC_FEATURE (17)..(17): X is I, L or V
  MISC_FEATURE (18)..(18): X is I, L or V
  MISC_FEATURE (19)..(19): X is I, L or V
  MISC_FEATURE (20)..(20): X is D and E for acidic amino acids
XXXXXXXXXXXXXXXXXXXX

SEQ ID NO: 734 - protein, 18 aa, Artificial
  Completely synthesized peptide construct
  MISC_FEATURE (1)..(1): X is acetyl or propionyl group, D glycine or D alanine, cyclohexylalanine at amino terminus
  MISC_FEATURE (2)..(2): X is A and G
  MISC_FEATURE (3)..(3): X is F or P
  MISC_FEATURE (4)..(4): X is T or S
  MISC_FEATURE (5)..(5): X is K, R or H for basic amino acids
  MISC_FEATURE (6)..(6): X is I, L or V
  MISC_FEATURE (7)..(7): X is F, W or Y for aromatic amino acids
  MISC_FEATURE (8)..(8): X is N or Q for amidated amino acids
  MISC_FEATURE (9)..(9): X is F or P
  MISC_FEATURE (10)..(10): X is T or S
  MISC_FEATURE (11)..(11): X is 5-aminopentanoic acid for replacement of 3 or 4 amino acids of X2 and X3
  MISC_FEATURE (12)..(12): X is D and E for acidic amino acids
  MISC_FEATURE (13)..(13): X is M or Nle (Norleucine)
  MISC_FEATURE (14)..(14): X is A and G
  MISC_FEATURE (15)..(15): X is K, R or H for basic amino acids
  MISC_FEATURE (16)..(16): X is GabaX for X2X3 or X3X2 or X2X3 or X3X2 or X3X3 or X2X2
  MISC_FEATURE (17)..(17): X is I, L or V
  MISC_FEATURE (18)..(18): X is D and E for acidic amino acids
XXXXXXXXXXXXXXXXXX

SEQ ID NO: 735 - protein, 16 aa, Artificial
  Completely synthesized peptide construct
  MISC_FEATURE (1)..(1): X is acetyl or propionyl group, D glycine or D alanine, cyclohexylalanine at amino terminus
  MISC_FEATURE (2)..(2): X is A and G
  MISC_FEATURE (3)..(3): X is F or P
  MISC_FEATURE (4)..(4): X is T or S
  MISC_FEATURE (5)..(5): X is K, R or H for basic amino acids
  MISC_FEATURE (6)..(6): X is I, L or V
  MISC_FEATURE (7)..(7): X is F, W or Y for aromatic amino acids
  MISC_FEATURE (8)..(8): X is N or Q for amidated amino acids
  MISC_FEATURE (9)..(9): X is F or P
  MISC_FEATURE (10)..(10): X is T or S
  MISC_FEATURE (11)..(11): X is 5-aminopentanoic acid for replacement of 3 or 4 amino acids of X2 and X3
  MISC_FEATURE (12)..(12): X is M or Nle (Norleucine)
  MISC_FEATURE (13)..(13): X is A and G
  MISC_FEATURE (14)..(14): X is K, R or H for basic amino acids
  MISC_FEATURE (15)..(15): X is 5-aminopentanoic acid for replacement of 3 or 4 amino acids of X2 and X3
  MISC_FEATURE (16)..(16): X is D and E for acidic amino acids
XXXXXXXXXXXXXXXX

SEQ ID NO: 736 - protein, 15 aa, Artificial
  Completely synthesized peptide construct
  MISC_FEATURE (1)..(1): X is acetyl or propionyl group, D glycine or D alanine, cyclohexylalanine at amino terminus
  MISC_FEATURE (2)..(2): X is A and G
  MISC_FEATURE (3)..(3): X is F or P
  MISC_FEATURE (4)..(4): X is T or S
  MISC_FEATURE (5)..(5): X is K, R or H for basic amino acids
  MISC_FEATURE (6)..(6): X is I, L or V
  MISC_FEATURE (7)..(7): X is F, W or Y for aromatic amino acids
  MISC_FEATURE (8)..(8): X is N or Q for amidated amino acids
  MISC_FEATURE (9)..(9): X is F or P
  MISC_FEATURE (10)..(10): X is T or S
  MISC_FEATURE (11)..(11): X is 5-aminopentanoic acid for replacement of 3 or 4 amino acids of X2 and X3
  MISC_FEATURE (12)..(12): X is M or Nle (Norleucine)
  MISC_FEATURE (13)..(13): X is A and G
  MISC_FEATURE (14)..(14): X is K, R or H for basic amino acids
  MISC_FEATURE (15)..(15): X is 5-aminopentanoic acid for replacement of 3 or 4 amino acids of X2 and X3
XXXXXXXXXXXXXXX

SEQ ID NO: 737 - protein, 13 aa, Homo sapiens
VIVELIPSTSSAV

SEQ ID NO: 738 - protein, 18 aa, Homo sapiens
DTPYLDITYHFVMQRLPL

SEQ ID NO: 739 - protein, 18 aa, Artificial
  Completely synthesized peptide construct
  MISC_FEATURE (1)..(1): X is D and E for acidic amino acids
  MISC_FEATURE (2)..(2): X is T or S
  MISC_FEATURE (3)..(3): X is F or P
  MISC_FEATURE (4)..(4): X is F, W or Y for aromatic amino acids
  MISC_FEATURE (5)..(5): X is I, L or V
  MISC_FEATURE (6)..(6): X is D and E for acidic amino acids
  MISC_FEATURE (7)..(7): X is I, L or V
  MISC_FEATURE (8)..(8): X is T or S
  MISC_FEATURE (9)..(9): X is F, W or Y for aromatic amino acids
  MISC_FEATURE (10)..(10): X is K, R or H for basic amino acids
  MISC_FEATURE (11)..(11): X is F or P
  MISC_FEATURE (12)..(12): X is I, L or V
  MISC_FEATURE (13)..(13): X is M or Nle (Norleucine)
  MISC_FEATURE (14)..(14): X is N or Q for amidated amino acids
  MISC_FEATURE (15)..(15): X is K, R or H for basic amino acids
  MISC_FEATURE (16)..(16): X is I, L or V
  MISC_FEATURE (17)..(17): X is F or P
  MISC_FEATURE (18)..(18): X is I, L or V
XXXXXXXXXXXXXXXXXX

SEQ ID NO: 740 - protein, 17 aa, Artificial
  Completely synthesized peptide construct
  MISC_FEATURE (1)..(1): X is D and E for acidic amino acids
  MISC_FEATURE (2)..(2): X is T or S
  MISC_FEATURE (3)..(3): X is F or P
  MISC_FEATURE (4)..(4): X is F, W or Y for aromatic amino acids
  MISC_FEATURE (5)..(5): X is GabaX for X2X3 or X3X2 or X2X3 or X3X2 or X3X3 or X2X2
  MISC_FEATURE (6)..(6): X is I, L or V
  MISC_FEATURE (7)..(7): X is T or S
  MISC_FEATURE (8)..(8): X is F, W or Y for aromatic amino acids
  MISC_FEATURE (9)..(9): X is K, R or H for basic amino acids
  MISC_FEATURE (10)..(10): X is F or P
  MISC_FEATURE (11)..(11): X is I, L or V
  MISC_FEATURE (12)..(12): X is M or Nle (Norleucine)
  MISC_FEATURE (13)..(13): X is N or Q for amidated amino acids
  MISC_FEATURE (14)..(14): X is K, R or H for basic amino acids
  MISC_FEATURE (15)..(15): X is I, L or V
  MISC_FEATURE (16)..(16): X is F or P
  MISC_FEATURE (17)..(17): X is I, L or V
XXXXXXXXXXXXXXXXX

SEQ ID NO: 741 - protein, 17 aa, Artificial
  Completely synthesized peptide construct
  MISC_FEATURE (1)..(1): X is D and E for acidic amino acids
  MISC_FEATURE (2)..(2): X is T or S
  MISC_FEATURE (3)..(3): X is F or P
  MISC_FEATURE (4)..(4): X is F, W or Y for aromatic amino acids
  MISC_FEATURE (5)..(5): X is I, L or V
  MISC_FEATURE (6)..(6): X is GabaX for X2X3 or X3X2 or X2X3 or X3X2 or X3X3 or X2X2
  MISC_FEATURE (7)..(7): X is T or S
  MISC_FEATURE (8)..(8): X is F, W or Y for aromatic amino acids
  MISC_FEATURE (9)..(9): X is K, R or H for basic amino acids
  MISC_FEATURE (10)..(10): X is F or P
  MISC_FEATURE (11)..(11): X is I, L or V
  MISC_FEATURE (12)..(12): X is M or Nle (Norleucine)
  MISC_FEATURE (13)..(13): X is N or Q for amidated amino acids
  MISC_FEATURE (14)..(14): X is K, R or H for basic amino acids
  MISC_FEATURE (15)..(15): X is I, L or V
  MISC_FEATURE (16)..(16): X is F or P
  MISC_FEATURE (17)..(17): X is I, L or V
XXXXXXXXXXXXXXXXX

SEQ ID NO: 742 - protein, 16 aa, Artificial
  Completely synthesized peptide construct
  MISC_FEATURE (1)..(1): X is D and E for acidic amino acids
  MISC_FEATURE (2)..(2): X is T or S
  MISC_FEATURE (3)..(3): X is F or P
  MISC_FEATURE (4)..(4): X is F, W or Y for aromatic amino acids
  MISC_FEATURE (5)..(5): X is 5-aminopentanoic acid for replacement of 3 or 4 amino acids of X2 and X3
  MISC_FEATURE (6)..(6): X is T or S
  MISC_FEATURE (7)..(7): X is F, W or Y for aromatic amino acids
  MISC_FEATURE (8)..(8): X is K, R or H for basic amino acids
  MISC_FEATURE (9)..(9): X is F or P
  MISC_FEATURE (10)..(10): X is I, L or V
  MISC_FEATURE (11)..(11): X is M or Nle (Norleucine)
  MISC_FEATURE (12)..(12): X is N or Q for amidated amino acids
  MISC_FEATURE (13)..(13): X is K, R or H for basic amino acids
  MISC_FEATURE (14)..(14): X is I, L or V
  MISC_FEATURE (15)..(15): X is F or P
  MISC_FEATURE (16)..(16): X is I, L or V
XXXXXXXXXXXXXXXX

SEQ ID NO: 743 - protein, 19 aa, Artificial
  Completely synthesized peptide construct
  MISC_FEATURE (1)..(1): X is acetyl or propionyl group, D glycine or D alanine, cyclohexylalanine at amino terminus
  MISC_FEATURE (2)..(2): X is D and E for acidic amino acids
  MISC_FEATURE (3)..(3): X is T or S
  MISC_FEATURE (4)..(4): X is F or P
  MISC_FEATURE (5)..(5): X is F, W or Y for aromatic amino acids
  MISC_FEATURE (6)..(6): X is I, L or V
  MISC_FEATURE (7)..(7): X is D and E for acidic amino acids
  MISC_FEATURE (8)..(8): X is I, L or V
  MISC_FEATURE (9)..(9): X is T or S
  MISC_FEATURE (10)..(10): X is F, W or Y for aromatic amino acids
  MISC_FEATURE (11)..(11): X is K, R or H for basic amino acids
  MISC_FEATURE (12)..(12): X is F or P
  MISC_FEATURE (13)..(13): X is I, L or V
  MISC_FEATURE (14)..(14): X is M or Nle (Norleucine)
  MISC_FEATURE (15)..(15): X is N or Q for amidated amino acids
  MISC_FEATURE (16)..(16): X is K, R or H for basic amino acids
  MISC_FEATURE (17)..(17): X is I, L or V
  MISC_FEATURE (18)..(18): X is F or P
  MISC_FEATURE (19)..(19): X is I, L or V
XXXXXXXXXXXXXXXXXXX

SEQ ID NO: 744 - protein, 18 aa, Artificial
  Completely synthesized peptide construct
  MISC_FEATURE (1)..(1): X is acetyl or propionyl group, D glycine or D alanine, cyclohexylalanine at amino terminus
  MISC_FEATURE (2)..(2): X is D and E for acidic amino acids
  MISC_FEATURE (3)..(3): X is T or S
  MISC_FEATURE (4)..(4): X is F or P
  MISC_FEATURE (5)..(5): X is F, W or Y for aromatic amino acids
  MISC_FEATURE (6)..(6): X is GabaX for X2X3 or X3X2 or X2X3 or X3X2 or X3X3 or X2X2
  MISC_FEATURE (7)..(7): X is I, L or V
  MISC_FEATURE (8)..(8): X is T or S
  MISC_FEATURE (9)..(9): X is F, W or Y for aromatic amino acids
  MISC_FEATURE (10)..(10): X is K, R or H for basic amino acids
  MISC_FEATURE (11)..(11): X is F or P
  MISC_FEATURE (12)..(12): X is I, L or V
  MISC_FEATURE (13)..(13): X is M or Nle (Norleucine)
  MISC_FEATURE (14)..(14): X is N or Q for amidated amino acids
  MISC_FEATURE (15)..(15): X is K, R or H for basic amino acids
  MISC_FEATURE (16)..(16): X is I, L or V
  MISC_FEATURE (17)..(17): X is F or P
  MISC_FEATURE (18)..(18): X is I, L or V
XXXXXXXXXXXXXXXXXX

SEQ ID NO: 745 - protein, 18 aa, Artificial
  Completely synthesized peptide construct
  MISC_FEATURE (1)..(1): X is acetyl or propionyl group, D glycine or D alanine, cyclohexylalanine at amino terminus
  MISC_FEATURE (2)..(2): X is D and E for acidic amino acids
  MISC_FEATURE (3)..(3): X is T or S
  MISC_FEATURE (4)..(4): X is F or P
  MISC_FEATURE (5)..(5): X is F, W or Y for aromatic amino acids
  MISC_FEATURE (6)..(6): X is I, L or V
  MISC_FEATURE (7)..(7): X is GabaX for X2X3 or X3X2 or X2X3 or X3X2 or X3X3 or X2X2
  MISC_FEATURE (8)..(8): X is T or S
  MISC_FEATURE (9)..(9): X is F, W or Y for aromatic amino acids
  MISC_FEATURE (10)..(10): X is K, R or H for basic amino acids
  MISC_FEATURE (11)..(11): X is F or P
  MISC_FEATURE (12)..(12): X is I, L or V
  MISC_FEATURE (13)..(13): X is M or Nle (Norleucine)
  MISC_FEATURE (14)..(14): X is N or Q for amidated amino acids
  MISC_FEATURE (15)..(15): X is K, R or H for basic amino acids
  MISC_FEATURE (16)..(16): X is I, L or V
  MISC_FEATURE (17)..(17): X is F or P
  MISC_FEATURE (18)..(18): X is I, L or V
XXXXXXXXXXXXXXXXXX

SEQ ID NO: 746 - protein, 17 aa, Artificial
  Completely synthesized peptide construct
  MISC_FEATURE (1)..(1): X is acetyl or propionyl group, D glycine or D alanine, cyclohexylalanine at amino terminus
  MISC_FEATURE (2)..(2): X is D and E for acidic amino acids
  MISC_FEATURE (3)..(3): X is T or S
  MISC_FEATURE (4)..(4): X is F or P
  MISC_FEATURE (5)..(5): X is F, W or Y for aromatic amino acids
  MISC_FEATURE (6)..(6): X is 5-aminopentanoic acid for replacement of 3 or 4 amino acids of X2 and X3
  MISC_FEATURE (7)..(7): X is T or S
  MISC_FEATURE (8)..(8): X is F, W or Y for aromatic amino acids
  MISC_FEATURE (9)..(9): X is K, R or H for basic amino acids
  MISC_FEATURE (10)..(10): X is F or P
  MISC_FEATURE (11)..(11): X is I, L or V
  MISC_FEATURE (12)..(12): X is M or Nle (Norleucine)
  MISC_FEATURE (13)..(13): X is N or Q for amidated amino acids
  MISC_FEATURE (14)..(14): X is K, R or H for basic amino acids
  MISC_FEATURE (15)..(15): X is I, L or V
  MISC_FEATURE (16)..(16): X is F or P
  MISC_FEATURE (17)..(17): X is I, L or V
XXXXXXXXXXXXXXXXX

SEQ ID NO: 747 - protein, 9 aa, Artificial
  Completely synthesized peptide construct
  MISC_FEATURE (1)..(1): X is A and G
  MISC_FEATURE (2)..(2): X is F, W or Y for aromatic amino acids
  MISC_FEATURE (3)..(3): X is M or Nle (Norleucine)
  MISC_FEATURE (4)..(4): X is T or S
  MISC_FEATURE (5)..(5): X is M or Nle (Norleucine)
  MISC_FEATURE (6)..(6): X is K, R or H for basic amino acids
  MISC_FEATURE (7)..(7): X is I, L or V
  MISC_FEATURE (8)..(8): X is K, R or H for basic amino acids
  MISC_FEATURE (9)..(9): X is N or Q for amidated amino acids
XXXXXXXXX

SEQ ID NO: 748 - protein, 10 aa, Artificial
  Completely synthesized peptide construct
  MISC_FEATURE (1)..(1): X is acetyl or propionyl group, D glycine or D alanine, cyclohexylalanine at amino terminus
  MISC_FEATURE (2)..(2): X is A and G
  MISC_FEATURE (3)..(3): X is F, W or Y for aromatic amino acids
  MISC_FEATURE (4)..(4): X is M or Nle (Norleucine)
  MISC_FEATURE (5)..(5): X is T or S
  MISC_FEATURE (6)..(6): X is M or Nle (Norleucine)
  MISC_FEATURE (7)..(7): X is K, R or H for basic amino acids
  MISC_FEATURE (8)..(8): X is I, L or V
  MISC_FEATURE (9)..(9): X is K, R or H for basic amino acids
  MISC_FEATURE (10)..(10): X is N or Q for amidated amino acids
XXXXXXXXXX

SEQ ID NO: 749 - protein, 25 aa, Homo sapiens
KRKLEGDLKLTQESIMDLENDKQQL

SEQ ID NO: 750 - protein, 25 aa, Artificial
  Completely synthesized peptide construct
  MISC_FEATURE (1)..(1): X is K, R or H for basic amino acids
  MISC_FEATURE (2)..(2): X is K, R or H for basic amino acids
  MISC_FEATURE (3)..(3): X is K, R or H for basic amino acids
  MISC_FEATURE (4)..(4): X is I, L or V
  MISC_FEATURE (5)..(5): X is D and E for acidic amino acids
  MISC_FEATURE (6)..(6): X is A and G
  MISC_FEATURE (7)..(7): X is D and E for acidic amino acids
  MISC_FEATURE (8)..(8): X is I, L or V
  MISC_FEATURE (9)..(9): X is K, R or H for basic amino acids
  MISC_FEATURE (10)..(10): X is I, L or V
  MISC_FEATURE (11)..(11): X is T or S
  MISC_FEATURE (12)..(12): X is N or Q for amidated amino acids
  MISC_FEATURE (13)..(13): X is I, L or V
  MISC_FEATURE (14)..(14): X is T or S
  MISC_FEATURE (15)..(15): X is I, L or V
  MISC_FEATURE (16)..(16): X is M or Nle (Norleucine)
  MISC_FEATURE (17)..(17): X is D and E for acidic amino acids
  MISC_FEATURE (18)..(18): X is I, L or V
  MISC_FEATURE (19)..(19): X is D and E for acidic amino acids
  MISC_FEATURE (20)..(20): X is N or Q for amidated amino acids
  MISC_FEATURE (21)..(21): X is D and E for acidic amino acids
  MISC_FEATURE (22)..(22): X is K, R or H for basic amino acids
  MISC_FEATURE (23)..(23): X is N or Q for amidated amino acids
  MISC_FEATURE (24)..(24): X is N or Q for amidated amino acids
  MISC_FEATURE (25)..(25): X is I, L or V
XXXXXXXXXXXXXXXXXXXXXXXXX

SEQ ID NO: 751 - protein, 19 aa, Homo sapiens
  MISC_FEATURE (1)..(1): X is acetyl or propionyl group, D glycine or D alanine, cyclohexylalanine at amino terminus
  MISC_FEATURE (2)..(2): X is K, R or H for basic amino acids
  MISC_FEATURE (3)..(3): X is K, R or H for basic amino acids
  MISC_FEATURE (4)..(4): X is K, R or H for basic amino acids
  MISC_FEATURE (5)..(5): X is I, L or V
  MISC_FEATURE (6)..(6): X is D and E for acidic amino acids
  MISC_FEATURE (7)..(7): X is A and G
  MISC_FEATURE (8)..(8): X is D and E for acidic amino acids
  MISC_FEATURE (9)..(9): X is I, L or V
  MISC_FEATURE (10)..(10): X is K, R or H for basic amino acids
  MISC_FEATURE (11)..(11): X is I, L or V
  MISC_FEATURE (12)..(12): X is T or S
  MISC_FEATURE (13)..(13): X is N or Q for amidated amino acids
  MISC_FEATURE (14)..(14): X is I, L or V
  MISC_FEATURE (15)..(15): X is T or S
  MISC_FEATURE (16)..(16): X is I, L or V
  MISC_FEATURE (17)..(17): X is M or Nle (Norleucine)
  MISC_FEATURE (18)..(18): X is D and E for acidic amino groups
  MISC_FEATURE (19)..(19): X is I, L or V
  MISC_FEATURE (20)..(20): X is D and E for acidic amino acids
  MISC_FEATURE (21)..(21): X is N or Q for amidated amino acids
  MISC_FEATURE (22)..(22): X is D and E for acidic amino acids
  MISC_FEATURE (23)..(23): X is K, R or H for basic amino acids
  MISC_FEATURE (24)..(24): X is N or Q for amidated amino acids
  MISC_FEATURE (25)..(25): X is N or Q for amidated amino acids
  MISC_FEATURE (26)..(26): X is I, L or V
VRRLAMENNIKLSEVVGSG

SEQ ID NO: 752 - protein, 22 aa, Artificial
  Completely synthesized peptide construct
  MISC_FEATURE (1)..(1): X is K, R or H for basic amino acids
  MISC_FEATURE (2)..(2): X is K, R or H for basic amino acids
  MISC_FEATURE (3)..(3): X is K, R or H for basic amino acids
  MISC_FEATURE (4)..(4): X is GabaX for X2X3 or X3X2 or X2X3 or X3X2 or X3X3 or X2X2
  MISC_FEATURE (5)..(5): X is A and G
  MISC_FEATURE (6)..(6): X is GabaX for X2X3 or X3X2 or X2X3 or X3X2 or X3X3 or X2X2
  MISC_FEATURE (7)..(7): X is K, R or H for basic amino acids
  MISC_FEATURE (8)..(8): X is I, L or V
  MISC_FEATURE (9)..(9): X is T or S
  MISC_FEATURE (10)..(10): X is N or Q for amidated amino acids
  MISC_FEATURE (11)..(11): X is I, L or V
  MISC_FEATURE (12)..(12): X is T or S
  MISC_FEATURE (13)..(13): X is I, L or V
  MISC_FEATURE (14)..(14): X is M or Nle (Norleucine)
  MISC_FEATURE (15)..(15): X is GabaX for X2X3 or X3X2 or X2X3 or X3X2 or X3X3 or X2X2
  MISC_FEATURE (16)..(16): X is D and E for acidic amino acids
  MISC_FEATURE (17)..(17): X is N or Q for amidated amino acids
  MISC_FEATURE (18)..(18): X is D and E for acidic amino acids
  MISC_FEATURE (19)..(19): X is K, R or H for basic amino acids
  MISC_FEATURE (20)..(20): X is N or Q for amidated amino acids
  MISC_FEATURE (21)..(21): X is N or Q for amidated amino acids
  MISC_FEATURE (22)..(22): X is I, L or V
XXXXXXXXXXXXXXXXXXXXXX

SEQ ID NO: 753 - protein, 18 aa, Homo sapiens
  MISC_FEATURE (1)..(1): X is acetyl or propionyl group, D glycine or D alanine, cyclohexylalanine at amino terminus
  MISC_FEATURE (2)..(2): X is K, R or H for basic amino acids
  MISC_FEATURE (3)..(3): X is K, R or H for basic amino acids
  MISC_FEATURE (4)..(4): X is K, R or H for basic amino acids
  MISC_FEATURE (5)..(5): X is GabaX for X2X3 or X3X2 or X2X3 or X3X2 or X3X3 or X2X2
  MISC_FEATURE (6)..(6): X is A and G
  MISC_FEATURE (7)..(7): X is GabaX for X2X3 or X3X2 or X2X3 or X3X2 or X3X3 or X2X2
  MISC_FEATURE (8)..(8): X is K, R or H for basic amino acids
  MISC_FEATURE (9)..(9): X is I, L or V
  MISC_FEATURE (10)..(10): X is T or S
  MISC_FEATURE (11)..(11): X is N or Q for amidated amino acids
  MISC_FEATURE (12)..(12): X is I, L or V
  MISC_FEATURE (13)..(13): X is T or S
  MISC_FEATURE (14)..(14): X is I, L or V
  MISC_FEATURE (15)..(15): X is M or Nle (Norleucine)
  MISC_FEATURE (16)..(16): X is GabaX for X2X3 or X3X2 or X2X3 or X3X2 or X3X3 or X2X2
  MISC_FEATURE (17)..(17): X is D and E for acidic amino acids
  MISC_FEATURE (18)..(18): X is N or Q for amidated amino acids
  MISC_FEATURE (19)..(19): X is D and E for acidic amino acids
  MISC_FEATURE (20)..(20): X is K, R or H for basic amino acids
  MISC_FEATURE (21)..(21): X is N or Q for amidated amino acids
  MISC_FEATURE (22)..(22): X is N or Q for amidated amino acids
  MISC_FEATURE (23)..(23): X is I, L or V
KEALISSLTRGKLTYTQQ

SEQ ID NO: 754 - protein, 23 aa, Artificial
  Completely synthesized peptide construct
  MISC_FEATURE (1)..(1): X is K, R or H for basic amino acids
  MISC_FEATURE (2)..(2): X is K, R or H for basic amino acids
  MISC_FEATURE (3)..(3): X is K, R or H for basic amino acids
  MISC_FEATURE (4)..(4): X is I, L or V
  MISC_FEATURE (5)..(5): X is D and E for acidic amino acids
  MISC_FEATURE (6)..(6): X is A and G
  MISC_FEATURE (7)..(7): X is D and E for acidic amino acids
  MISC_FEATURE (8)..(8): X is I, L or V
  MISC_FEATURE (9)..(9): X is K, R or H for basic amino acids
  MISC_FEATURE (10)..(10): X is I, L or V
  MISC_FEATURE (11)..(11): X is T or S
  MISC_FEATURE (12)..(12): X is N or Q for amidated amino acids
  MISC_FEATURE (13)..(13): X is I, L or V
  MISC_FEATURE (14)..(14): X is T or S
  MISC_FEATURE (15)..(15): X is I, L or V
  MISC_FEATURE (16)..(16): X is M or Nle (Norleucine)
  MISC_FEATURE (17)..(17): X is 5-aminopentanoic acid for replacement of 3 or 4 amino acids of X2 and X3
  MISC_FEATURE (18)..(18): X is N or Q for amidated amino acids
  MISC_FEATURE (19)..(19): X is D and E for acidic amino acids
  MISC_FEATURE (20)..(20): X is K, R or H for basic amino acids
  MISC_FEATURE (21)..(21): X is N or Q for amidated amino acids
  MISC_FEATURE (22)..(22): X is N or Q for amidated amino acids
  MISC_FEATURE (23)..(23): X is I, L or V
XXXXXXXXXXXXXXXXXXXXXXX

SEQ ID NO: 755 - protein, 18 aa, Homo sapiens
  MISC_FEATURE (1)..(1): X is acetyl or propionyl group, D glycine or D alanine, cyclohexylalanine at amino terminus
  MISC_FEATURE (2)..(2): X is K, R or H for basic amino acids
  MISC_FEATURE (3)..(3): X is K, R or H for basic amino acids
  MISC_FEATURE (4)..(4): X is K, R or H for basic amino acids
  MISC_FEATURE (5)..(5): X is I, L or V
  MISC_FEATURE (6)..(6): X is D and E for acidic amino acids
  MISC_FEATURE (7)..(7): X is A and G
  MISC_FEATURE (8)..(8): X is D and E for acidic amino acids
  MISC_FEATURE (9)..(9): X is I, L or V
  MISC_FEATURE (10)..(10): X is K, R or H for basic amino acids
  MISC_FEATURE (11)..(11): X is I, L or V
  MISC_FEATURE (12)..(12): X is T or S
  MISC_FEATURE (13)..(13): X is N or Q for amidated amino acids
  MISC_FEATURE (14)..(14): X is I, L or V
  MISC_FEATURE (15)..(15): X is T or S
  MISC_FEATURE (16)..(16): X is I, L or V
  MISC_FEATURE (17)..(17): X is M or Nle (Norleucine)
  MISC_FEATURE (18)..(18): X is 5-aminopentanoic acid for replacement of 3 or 4 amino acids of X2 and X3
  MISC_FEATURE (19)..(19): X is N or Q for amidated amino acids
  MISC_FEATURE (20)..(20): X is D and E for acidic amino acids
  MISC_FEATURE (21)..(21): X is K, R or H for basic amino acids
  MISC_FEATURE (22)..(22): X is N or Q for amidated amino acids
  MISC_FEATURE (23)..(23): X is N or Q for amidated amino acids
  MISC_FEATURE (24)..(24): X is I, L or V
SERVQLLHSQNTSLINQK

SEQ ID NO: 756 - protein, 19 aa, Artificial
  Completely synthesized peptide construct
  MISC_FEATURE (1)..(1): X is I, L or V
  MISC_FEATURE (2)..(2): X is K, R or H for basic amino acids
  MISC_FEATURE (3)..(3): X is K, R or H for basic amino acids
  MISC_FEATURE (4)..(4): X is I, L or V
  MISC_FEATURE (5)..(5): X is A and G
  MISC_FEATURE (6)..(6): X is M or Nle (Norleucine)
  MISC_FEATURE (7)..(7): X is D and E for acidic amino acids
  MISC_FEATURE (8)..(8): X is N or Q for amidated amino acids
  MISC_FEATURE (9)..(9): X is N or Q for amidated amino acids
  MISC_FEATURE (10)..(10): X is I, L or V
  MISC_FEATURE (11)..(11): X is K, R or H for basic amino acids
  MISC_FEATURE (12)..(12): X is I, L or V
  MISC_FEATURE (13)..(13): X is T or S
  MISC_FEATURE (14)..(14): X is D and E for acidic amino acids
  MISC_FEATURE (15)..(15): X is I, L or V
  MISC_FEATURE (16)..(16): X is I, L or V
  MISC_FEATURE (17)..(17): X is A and G
  MISC_FEATURE (18)..(18): X is T or S
  MISC_FEATURE (19)..(19): X is A and G
XXXXXXXXXXXXXXXXXXX

SEQ ID NO: 757 - protein, 20 aa, Artificial
  Completely synthesized peptide construct
  MISC_FEATURE (1)..(1): X is acetyl or propionyl group, D glycine or D alanine, cyclohexylalanine at amino terminus
  MISC_FEATURE (2)..(2): X is I, L or V
  MISC_FEATURE (3)..(3): X is K, R or H for basic amino acids
  MISC_FEATURE (4)..(4): X is K, R or H for basic amino acids
  MISC_FEATURE (5)..(5): X is I, L or V
  MISC_FEATURE (6)..(6): X is A and G
  MISC_FEATURE (7)..(7): X is M or Nle (Norleucine)
  MISC_FEATURE (8)..(8): X is D and E for acidic amino acids
  MISC_FEATURE (9)..(9): X is N or Q for amidated amino acids
  MISC_FEATURE (10)..(10): X is N or Q for amidated amino acids
  MISC_FEATURE (11)..(11): X is I, L or V
  MISC_FEATURE (12)..(12): X is K, R or H for basic amino acids
  MISC_FEATURE (13)..(13): X is I, L or V
  MISC_FEATURE (14)..(14): X is T or S
  MISC_FEATURE (15)..(15): X is D and E for acidic amino acids
  MISC_FEATURE (16)..(16): X is I, L or V
  MISC_FEATURE (17)..(17): X is I, L or V
  MISC_FEATURE (18)..(18): X is A and G
  MISC_FEATURE (19)..(19): X is T or S
  MISC_FEATURE (20)..(20): X is A and G
XXXXXXXXXXXXXXXXXXXX

SEQ ID NO: 758 - protein, 18 aa, Artificial
  Completely synthesized peptide construct
  MISC_FEATURE (1)..(1): X is I, L or V
  MISC_FEATURE (2)..(2): X is K, R or H for basic amino acids
  MISC_FEATURE (3)..(3): X is K, R or H for basic amino acids
  MISC_FEATURE (4)..(4): X is I, L or V
  MISC_FEATURE (5)..(5): X is A and G
  MISC_FEATURE (6)..(6): X is M or Nle (Norleucine)
  MISC_FEATURE (7)..(7): X is D and E for acidic amino acids
  MISC_FEATURE (8)..(8): X is N or Q for amidated amino acids
  MISC_FEATURE (9)..(9): X is N or Q for amidated amino acids
  MISC_FEATURE (10)..(10): X is I, L or V
  MISC_FEATURE (11)..(11): X is K, R or H for basic amino acids
  MISC_FEATURE (12)..(12): X is I, L or V
  MISC_FEATURE (13)..(13): X is T or S
  MISC_FEATURE (14)..(14): X is GabaX for X2X3 or X3X2 or X2X3 or X3X2 or X3X3 or X2X2
  MISC_FEATURE (15)..(15): X is I, L or V
  MISC_FEATURE (16)..(16): X is A and G
  MISC_FEATURE (17)..(17): X is T or S
  MISC_FEATURE (18)..(18): X is A and G
XXXXXXXXXXXXXXXXXX

SEQ ID NO: 759 - protein, 17 aa, Artificial
  Completely synthesized peptide construct
  MISC_FEATURE (1)..(1): X is I, L or V
  MISC_FEATURE (2)..(2): X is K, R or H for basic amino acids
  MISC_FEATURE (3)..(3): X is K, R or H for basic amino acids
  MISC_FEATURE (4)..(4): X is I, L or V
  MISC_FEATURE (5)..(5): X is A and G
  MISC_FEATURE (6)..(6): X is M or Nle (Norleucine)
  MISC_FEATURE (7)..(7): X is D and E for acidic amino acids
  MISC_FEATURE (8)..(8): X is N or Q for amidated amino acids
  MISC_FEATURE (9)..(9): X is N or Q for amidated amino acids
  MISC_FEATURE (10)..(10): X is I, L or V
  MISC_FEATURE (11)..(11): X is K, R or H for basic amino acids
  MISC_FEATURE (12)..(12): X is I, L or V
  MISC_FEATURE (13)..(13): X is T or S
  MISC_FEATURE (14)..(14): X is 5-aminopentanoic acid for replacement of 3 or 4 amino acids of X2 and X3
  MISC_FEATURE (15)..(15): X is A and G
  MISC_FEATURE (16)..(16): X is T or S
  MISC_FEATURE (17)..(17): X is A and G
XXXXXXXXXXXXXXXXX

SEQ ID NO: 760 - protein, 19 aa, Artificial
  Completely synthesized peptide construct
  MISC_FEATURE (1)..(1): X is acetyl or propionyl group, D glycine or D alanine, cyclohexylalanine at amino terminus
  MISC_FEATURE (2)..(2): X is I, L or V
  MISC_FEATURE (3)..(3): X is K, R or H for basic amino acids
  MISC_FEATURE (4)..(4): X is K, R or H for basic amino acids
  MISC_FEATURE (5)..(5): X is I, L or V
  MISC_FEATURE (6)..(6): X is A and G
  MISC_FEATURE (7)..(7): X is M or Nle (Norleucine)
  MISC_FEATURE (8)..(8): X is D and E for acidic amino acids
  MISC_FEATURE (9)..(9): X is N or Q for amidated amino acids
  MISC_FEATURE (10)..(10): X is N or Q for amidated amino acids
  MISC_FEATURE (11)..(11): X is I, L or V
  MISC_FEATURE (12)..(12): X is K, R or H for basic amino acids
  MISC_FEATURE (13)..(13): X is I, L or V
  MISC_FEATURE (14)..(14): X is T or S
  MISC_FEATURE (15)..(15): X is GabaX for X2X3 or X3X2 or X2X3 or X3X2 or X3X3 or X2X2
  MISC_FEATURE (16)..(16): X is I, L or V
  MISC_FEATURE (17)..(17): X is A and G
  MISC_FEATURE (18)..(18): X is T or S
  MISC_FEATURE (19)..(19): X is A and G
XXXXXXXXXXXXXXXXXXX

SEQ ID NO: 761 - protein, 18 aa, Artificial
  Completely synthesized peptide construct
  MISC_FEATURE (1)..(1): X is acetyl or propionyl group, D glycine or D alanine, cyclohexylalanine at amino terminus
  MISC_FEATURE (2)..(2): X is I, L or V
  MISC_FEATURE (3)..(3): X is K, R or H for basic amino acids
  MISC_FEATURE (4)..(4): X is K, R or H for basic amino acids
  MISC_FEATURE (5)..(5): X is I, L or V
  MISC_FEATURE (6)..(6): X is A and G
  MISC_FEATURE (7)..(7): X is M or Nle (Norleucine)
  MISC_FEATURE (8)..(8): X is D and E for acidic amino acids
  MISC_FEATURE (9)..(9): X is N or Q for amidated amino acids
  MISC_FEATURE (10)..(10): X is N or Q for amidated amino acids
  MISC_FEATURE (11)..(11): X is I, L or V
  MISC_FEATURE (12)..(12): X is K, R or H for basic amino acids
  MISC_FEATURE (13)..(13): X is I, L or V
  MISC_FEATURE (14)..(14): X is T or S
  MISC_FEATURE (15)..(15): X is 5-aminopentanoic acid for replacement of 3 or 4 amino acids of X2 and X3
  MISC_FEATURE (16)..(16): X is A and G
  MISC_FEATURE (17)..(17): X is T or S
  MISC_FEATURE (18)..(18): X is A and G
XXXXXXXXXXXXXXXXXX

SEQ ID NO: 762 - protein, 18 aa, Artificial
  Completely synthesized peptide construct
  MISC_FEATURE (1)..(1): X is K, R or H for basic amino acids
  MISC_FEATURE (2)..(2): X is D and E for acidic amino acids
  MISC_FEATURE (3)..(3): X is A and G
  MISC_FEATURE (4)..(4): X is I, L or V
  MISC_FEATURE (5)..(5): X is I, L or V
  MISC_FEATURE (6)..(6): X is T or S
  MISC_FEATURE (7)..(7): X is T or S
  MISC_FEATURE (8)..(8): X is I, L or V
  MISC_FEATURE (9)..(9): X is T or S
  MISC_FEATURE (10)..(10): X is K, R or H for basic amino acids
  MISC_FEATURE (11)..(11): X is A and G
  MISC_FEATURE (12)..(12): X is K, R or H for basic amino acids
  MISC_FEATURE (13)..(13): X is I, L or V
  MISC_FEATURE (14)..(14): X is T or S
  MISC_FEATURE (15)..(15): X is F, W or Y for aromatic amino acids
  MISC_FEATURE (16)..(16): X is T or S
  MISC_FEATURE (17)..(17): X is N or Q for amidated amino acids
  MISC_FEATURE (18)..(18): X is N or Q for amidated amino acids
XXXXXXXXXXXXXXXXXX

SEQ ID NO: 763 - protein, 19 aa, Artificial
  Completely synthesized peptide construct
  MISC_FEATURE (1)..(1): X is acetyl or propionyl group, D glycine or D alanine, cyclohexylalanine at amino terminus
  MISC_FEATURE (2)..(2): X is K, R or H for basic amino acids
  MISC_FEATURE (3)..(3): X is D and E for acidic amino acids
  MISC_FEATURE (4)..(4): X is A and G
  MISC_FEATURE (5)..(5): X is I, L or V
  MISC_FEATURE (6)..(6): X is I, L or V
  MISC_FEATURE (7)..(7): X is T or S
  MISC_FEATURE (8)..(8): X is T or S
  MISC_FEATURE (9)..(9): X is I, L or V
  MISC_FEATURE (10)..(10): X is T or S
  MISC_FEATURE (11)..(11): X is K, R or H for basic amino acids
  MISC_FEATURE (12)..(12): X is A and G
  MISC_FEATURE (13)..(13): X is K, R or H for basic amino acids
  MISC_FEATURE (14)..(14): X is I, L or V
  MISC_FEATURE (15)..(15): X is T or S
  MISC_FEATURE (16)..(16): X is F, W or Y for aromatic amino acids
  MISC_FEATURE (17)..(17): X is T or S
  MISC_FEATURE (18)..(18): X is N or Q for amidated amino acids
  MISC_FEATURE (19)..(19): X is N or Q for amidated amino acids
XXXXXXXXXXXXXXXXXXX

SEQ ID NO: 764 - protein, 17 aa, Artificial
  Completely synthesized peptide construct
  MISC_FEATURE (1)..(1): X is K, R or H for basic amino acids
  MISC_FEATURE (2)..(2): X is D and E for acidic amino acids
  MISC_FEATURE (3)..(3): X is A and G
  MISC_FEATURE (4)..(4): X is GabaX for X2X3 or X3X2 or X2X3 or X3X2 or X3X3 or X2X2
  MISC_FEATURE (5)..(5): X is T or S
  MISC_FEATURE (6)..(6): X is T or S
  MISC_FEATURE (7)..(7): X is I, L or V
  MISC_FEATURE (8)..(8): X is T or S
  MISC_FEATURE (9)..(9): X is K, R or H for basic amino acids
  MISC_FEATURE (10)..(10): X is A and G
  MISC_FEATURE (11)..(11): X is K, R or H for basic amino acids
  MISC_FEATURE (12)..(12): X is I, L or V
  MISC_FEATURE (13)..(13): X is T or S
  MISC_FEATURE (14)..(14): X is F, W or Y for aromatic amino acids
  MISC_FEATURE (15)..(15): X is T or S
  MISC_FEATURE (16)..(16): X is N or Q for amidated amino acids
  MISC_FEATURE (17)..(17): X is N or Q for amidated amino acids
XXXXXXXXXXXXXXXXX

SEQ ID NO: 765 - protein, 18 aa, Artificial
  Completely synthesized peptide construct
  MISC_FEATURE (1)..(1): X is acetyl or propionyl group, D glycine or D alanine, cyclohexylalanine at amino terminus
  MISC_FEATURE (2)..(2): X is K, R or H for basic amino acids
  MISC_FEATURE (3)..(3): X is D and E for acidic amino acids
  MISC_FEATURE (4)..(4): X is A and G
  MISC_FEATURE (5)..(5): X is GabaX for X2X3 or X3X2 or X2X3 or X3X2 or X3X3 or X2X2
  MISC_FEATURE (6)..(6): X is T or S
  MISC_FEATURE (7)..(7): X is T or S
  MISC_FEATURE (8)..(8): X is I, L or V
  MISC_FEATURE (9)..(9): X is T or S
  MISC_FEATURE (10)..(10): X is K, R or H for basic amino acids
  MISC_FEATURE (11)..(11): X is A and G
  MISC_FEATURE (12)..(12): X is K, R or H for basic amino acids
  MISC_FEATURE (13)..(13): X is I, L or V
  MISC_FEATURE (14)..(14): X is T or S
  MISC_FEATURE (15)..(15): X is F, W or Y for aromatic amino acids
  MISC_FEATURE (16)..(16): X is T or S
  MISC_FEATURE (17)..(17): X is N or Q for amidated amino acids
  MISC_FEATURE (18)..(18): X is N or Q for amidated amino acids
XXXXXXXXXXXXXXXXXX

SEQ ID NO: 766 - protein, 18 aa, Artificial
  Completely synthesized peptide construct
  MISC_FEATURE (1)..(1): X is T or S
  MISC_FEATURE (2)..(2): X is D and E for acidic amino acids
  MISC_FEATURE (3)..(3): X is K, R or H for basic amino acids
  MISC_FEATURE (4)..(4): X is I, L or V
  MISC_FEATURE (5)..(5): X is N or Q for amidated amino acids
  MISC_FEATURE (6)..(6): X is I, L or V
  MISC_FEATURE (7)..(7): X is I, L or V
  MISC_FEATURE (8)..(8): X is K, R or H for basic amino acids
  MISC_FEATURE (9)..(9): X is T or S
  MISC_FEATURE (10)..(10): X is N or Q for amidated amino acids
  MISC_FEATURE (11)..(11): X is N or Q for amidated amino acids
  MISC_FEATURE (12)..(12): X is T or S
  MISC_FEATURE (13)..(13): X is T or S
  MISC_FEATURE (14)..(14): X is I, L or V
  MISC_FEATURE (15)..(15): X is I, L or V
  MISC_FEATURE (16)..(16): X is T or S
  MISC_FEATURE (17)..(17): X is T or S
  MISC_FEATURE (18)..(18): X is K, R or H for basic amino acids
XXXXXXXXXXXXXXXXXX

SEQ ID NO: 767 - protein, 18 aa, Artificial
  Completely synthesized peptide construct
  MISC_FEATURE (1)..(1): X is T or S
  MISC_FEATURE (2)..(2): X is D and E for acidic amino acids
  MISC_FEATURE (3)..(3): X is K, R or H for basic amino acids
  MISC_FEATURE (4)..(4): X is I, L or V
  MISC_FEATURE (5)..(5): X is N or Q for amidated amino acids
  MISC_FEATURE (6)..(6): X is I, L or V
  MISC_FEATURE (7)..(7): X is I, L or V
  MISC_FEATURE (8)..(8): X is K, R or H for basic amino acids
  MISC_FEATURE (9)..(9): X is T or S
  MISC_FEATURE (10)..(10): X is N or Q for amidated amino acids
  MISC_FEATURE (11)..(11): X is N or Q for amidated amino acids
  MISC_FEATURE (12)..(12): X is T or S
  MISC_FEATURE (13)..(13): X is T or S
  MISC_FEATURE (14)..(14): X is I, L or V
  MISC_FEATURE (15)..(15): X is I, L or V
  MISC_FEATURE (16)..(16): X is T or S
  MISC_FEATURE (17)..(17): X is T or S
  MISC_FEATURE (18)..(18): X is K, R or H for basic amino acids
XXXXXXXXXXXXXXXXXX

SEQ ID NO: 768 - protein, 19 aa, Artificial
  Completely synthesized peptide construct
  MISC_FEATURE (1)..(1): X is acetyl or propionyl group, D glycine or D alanine, cyclohexylalanine at amino terminus
  MISC_FEATURE (2)..(2): X is T or S
  MISC_FEATURE (3)..(3): X is D and E for acidic amino acids
  MISC_FEATURE (4)..(4): X is K, R or H for basic amino acids
  MISC_FEATURE (5)..(5): X is I, L or V
  MISC_FEATURE (6)..(6): X is N or Q for amidated amino acids
  MISC_FEATURE (7)..(7): X is I, L or V
  MISC_FEATURE (8)..(8): X is I, L or V
  MISC_FEATURE (9)..(9): X is K, R or H for basic amino acids
  MISC_FEATURE (10)..(10): X is T or S
  MISC_FEATURE (11)..(11): X is N or Q for amidated amino acids
  MISC_FEATURE (12)..(12): X is N or Q for amidated amino acids
  MISC_FEATURE (13)..(13): X is T or S
  MISC_FEATURE (14)..(14): X is T or S
  MISC_FEATURE (15)..(15): X is I, L or V
  MISC_FEATURE (16)..(16): X is I, L or V
  MISC_FEATURE (17)..(17): X is T or S
  MISC_FEATURE (18)..(18): X is T or S
  MISC_FEATURE (19)..(19): X is K, R or H for basic amino acids
XXXXXXXXXXXXXXXXXXX

SEQ ID NO: 769 - protein, 17 aa, Artificial
  Completely synthesized peptide construct
  MISC_FEATURE (1)..(1): X is acetyl or propionyl group, D glycine or D alanine, cyclohexylalanine at amino terminus
  MISC_FEATURE (2)..(2): X is T or S
  MISC_FEATURE (3)..(3): X is D and E for acidic amino acids
  MISC_FEATURE (4)..(4): X is K, R or H for basic amino acids
  MISC_FEATURE (5)..(5): X is I, L or V
  MISC_FEATURE (6)..(6): X is N or Q for amidated amino acids
  MISC_FEATURE (7)..(7): X is GabaX for X2X3 or X3X2 or X2X3 or X3X2 or X3X3 or X2X2
  MISC_FEATURE (8)..(8): X is K, R or H for basic amino acids
  MISC_FEATURE (9)..(9): X is T or S
  MISC_FEATURE (10)..(10): X is N or Q for amidated amino acids
  MISC_FEATURE (11)..(11): X is N or Q for amidated amino acids
  MISC_FEATURE (12)..(12): X is T or S
  MISC_FEATURE (13)..(13): X is T or S
  MISC_FEATURE (14)..(14): X is GabaX for X2X3 or X3X2 or X2X3 or X3X2 or X3X3 or X2X2
  MISC_FEATURE (15)..(15): X is T or S
  MISC_FEATURE (16)..(16): X is T or S
  MISC_FEATURE (17)..(17): X is K, R or H for basic amino acids
XXXXXXXXXXXXXXXXX

SEQ ID NO: 770 - protein, 18 aa, Artificial
  Completely synthesized peptide construct
  MISC_FEATURE (1)..(1): X is D and E for acidic amino acids
  MISC_FEATURE (2)..(2): X is A and G
  MISC_FEATURE (3)..(3): X is N or Q for amidated amino acids
  MISC_FEATURE (4)..(4): X is D and E for acidic amino acids
  MISC_FEATURE (5)..(5): X is D and E for acidic amino acids
  MISC_FEATURE (6)..(6): X is K, R or H for basic amino acids
  MISC_FEATURE (7)..(7): X is A and G
  MISC_FEATURE (8)..(8): X is A and G
  MISC_FEATURE (9)..(9): X is I, L or V
  MISC_FEATURE (10)..(10): X is I, L or V
  MISC_FEATURE (11)..(11): X is C or S
  MISC_FEATURE (12)..(12): X is T or S
  MISC_FEATURE (13)..(13): X is A and G
  MISC_FEATURE (14)..(14): X is I, L or V
  MISC_FEATURE (15)..(15): X is I, L or V
  MISC_FEATURE (16)..(16): X is A and G
  MISC_FEATURE (17)..(17): X is A and G
  MISC_FEATURE (18)..(18): X is A and G
XXXXXXXXXXXXXXXXXX

SEQ ID NO: 771 - protein, 19 aa, Artificial
  Completely synthesized peptide construct
  MISC_FEATURE (1)..(1): X is acetyl or propionyl group, D glycine or D alanine, cyclohexylalanine at amino terminus
  MISC_FEATURE (2)..(2): X is D and E for acidic amino acids
  MISC_FEATURE (3)..(3): X is A and G
  MISC_FEATURE (4)..(4): X is N or Q for amidated amino acids
  MISC_FEATURE (5)..(5): X is D and E for acidic amino acids
  MISC_FEATURE (6)..(6): X is D and E for acidic amino acids
  MISC_FEATURE (7)..(7): X is K, R or H for basic amino acids
  MISC_FEATURE (8)..(8): X is A and G
  MISC_FEATURE (9)..(9): X is A and G
  MISC_FEATURE (10)..(10): X is I, L or V
  MISC_FEATURE (11)..(11): X is I, L or V
  MISC_FEATURE (12)..(12): X is C or S
  MISC_FEATURE (13)..(13): X is T or S
  MISC_FEATURE (14)..(14): X is A and G
  MISC_FEATURE (15)..(15): X is I, L or V
  MISC_FEATURE (16)..(16): X is I, L or V
  MISC_FEATURE (17)..(17): X is A and G
  MISC_FEATURE (18)..(18): X is A and G
  MISC_FEATURE (19)..(19): X is A and G
XXXXXXXXXXXXXXXXXXX

SEQ ID NO: 772 - protein, 16 aa, Artificial
  Completely synthesized peptide construct
  MISC_FEATURE (1)..(1): X is acetyl or propionyl group, D glycine or D alanine, cyclohexylalanine at amino terminus
  MISC_FEATURE (2)..(2): X is D and E for acidic amino acids
  MISC_FEATURE (3)..(3): X is A and G
  MISC_FEATURE (4)..(4): X is N or Q for amidated amino acids
  MISC_FEATURE (5)..(5): X is GabaX for X2X3 or X3X2 or X2X3 or X3X2 or X3X3 or X2X2
  MISC_FEATURE (6)..(6): X is K, R or H for basic amino acids
  MISC_FEATURE (7)..(7): X is A and G
  MISC_FEATURE (8)..(8): X is A and G
  MISC_FEATURE (9)..(9): X is GabaX for X2X3 or X3X2 or X2X3 or X3X2 or X3X3 or X2X2
  MISC_FEATURE (10)..(10): X is C or S
  MISC_FEATURE (11)..(11): X is T or S
  MISC_FEATURE (12)..(12): X is A and G
  MISC_FEATURE (13)..(13): X is GabaX for X2X3 or X3X2 or X2X3 or X3X2 or X3X3 or X2X2
  MISC_FEATURE (14)..(14): X is A and G
  MISC_FEATURE (15)..(15): X is A and G
  MISC_FEATURE (16)..(16): X is A and G
XXXXXXXXXXXXXXXX

SEQ ID NO: 773 - protein, 70 aa, Homo sapiens [sequence omitted]

SEQ ID NO: 774 - protein, 18 aa, Homo sapiens [sequence omitted]

SEQ ID NO: 775 - protein, 108 aa, Homo sapiens
KKPGESLKISCQGSGYNFNTYYIAWVRHMPGYGLEWMGIIYPDDSTIRYSPSFQGQVTISADKSTTTAYLQWNSLKASDTAMYYCARRVASALSYWYFDLWGQGTLVT

SEQ ID NO: 776 - protein, 93 aa, Homo sapiens [sequence omitted]

SEQ ID NO: 777 - protein, 31 aa, Artificial; identical to SEQ ID NO: 123
  Completely synthesized peptide construct
  MISC_FEATURE (1)..(1): X is D and E for acidic amino acids
  MISC_FEATURE (2)..(2): X is I, L or V
  MISC_FEATURE (3)..(3): X is I, L or V
  MISC_FEATURE (4)..(4): X is K, R or H for basic amino acids
  MISC_FEATURE (5)..(5): X is N or Q for amidated amino acids
  MISC_FEATURE (6)..(6): X is A and G
  MISC_FEATURE (7)..(7): X is D and E for acidic amino acids
  MISC_FEATURE (8)..(8): X is K, R or H for basic amino acids
  MISC_FEATURE (9)..(9): X is I, L or V
  MISC_FEATURE (10)..(10): X is D and E for acidic amino acids
  MISC_FEATURE (11)..(11): X is K, R or H for basic amino acids
  MISC_FEATURE (12)..(12): X is I, L or V
  MISC_FEATURE (13)..(13): X is D and E for acidic amino acids
  MISC_FEATURE (14)..(14): X is A and G
  MISC_FEATURE (15)..(15): X is A and G
  MISC_FEATURE (16)..(16): X is A and G
  MISC_FEATURE (17)..(17): X is acetyl or propionyl group, D glycine or D alanine, cyclohexylalanine at amino terminus
  MISC_FEATURE (18)..(18): X is C or S
  MISC_FEATURE (19)..(19): X is I, L or V
  MISC_FEATURE (20)..(20): X is K, R or H for basic amino acids
  MISC_FEATURE (21)..(21): X is I, L or V
  MISC_FEATURE (22)..(22): X is M or Nle (Norleucine)
  MISC_FEATURE (23)..(23): X is A and G
  MISC_FEATURE (24)..(24): X is T or S
  MISC_FEATURE (25)..(25): X is I, L or V
  MISC_FEATURE (26)..(26): X is F or P
  MISC_FEATURE (27)..(27): X is C or S
  MISC_FEATURE (28)..(28): X is C or S
  MISC_FEATURE (29)..(29): X is F, W or Y for aromatic amino acids
  MISC_FEATURE (30)..(30): X is A and G
  MISC_FEATURE (31)..(31): X is T or S

SEQ ID NO: 778 - protein, 33 aa, Artificial
  Completely synthesized peptide construct
DGQEEKAGVVSTGLIGGGDGQEEKAGVVSTGLI

SEQ ID NO: 779 - protein, 32 aa, Artificial; identical to SEQ ID NO: 153
  Completely synthesized peptide construct
  MISC_FEATURE (1)..(1): X is acetyl or propionyl group, D glycine or D alanine, cyclohexylalanine at amino terminus
  MISC_FEATURE (2)..(2): X is D and E for acidic amino acids
  MISC_FEATURE (3)..(3): X is A and G
  MISC_FEATURE (4)..(4): X is N or Q for amidated amino acids
  MISC_FEATURE (5)..(5): X is GabaX for X2X3 or X3X2 or X2X3 or X3X2 or X3X3 or X2X2
  MISC_FEATURE (6)..(6): X is K, R or H for basic amino acids
  MISC_FEATURE (7)..(7): X is A and G
  MISC_FEATURE (8)..(8): X is A and G
  MISC_FEATURE (9)..(9): X is GabaX for X2X3 or X3X2 or X2X3 or X3X2 or X3X3 or X2X2
  MISC_FEATURE (10)..(10): X is C or S
  MISC_FEATURE (11)..(11): X is T or S
  MISC_FEATURE (12)..(12): X is A and G
  MISC_FEATURE (13)..(13): X is GabaX for X2X3 or X3X2 or X2X3 or X3X2 or X3X3 or X2X2
  MISC_FEATURE (14)..(14): X is A and G
  MISC_FEATURE (15)..(15): X is A and G
  MISC_FEATURE (16)..(16): X is A and G
  MISC_FEATURE (17)..(17): X is A and G
  MISC_FEATURE (18)..(18): X is acetyl or propionyl group, D glycine or D alanine, cyclohexylalanine at amino terminus
  MISC_FEATURE (19)..(19): X is C or S
  MISC_FEATURE (20)..(20): X is K, R or H for basic amino acids
  MISC_FEATURE (21)..(21): X is I, L or V
  MISC_FEATURE (22)..(22): X is I, L or V
  MISC_FEATURE (23)..(23): X is D and E for acidic amino acids
  MISC_FEATURE (24)..(24): X is A and G
  MISC_FEATURE (25)..(25): X is I, L or V
  MISC_FEATURE (26)..(26): X is F, W or Y for aromatic amino acids
  MISC_FEATURE (27)..(27): X is I, L or V
  MISC_FEATURE (28)..(28): X is C or S
  MISC_FEATURE (29)..(29): X is A and G
  MISC_FEATURE (30)..(30): X is D and E for acidic amino acids
  MISC_FEATURE (31)..(31): X is K, R or H for basic amino acids
  MISC_FEATURE (32)..(32): X is A and G

SEQ ID NO: 780 - protein, 38 aa, Artificial
  Completely synthesized peptide construct
DGQEEKAGVVSTGLIGGGDGEAGKPGKAGERGPPGPQG

SEQ ID NO: 781 - protein, 37 aa, Artificial; identical to SEQ ID NO: 151
  Completely synthesized peptide construct
  MISC_FEATURE (1)..(1): X is acetyl or propionyl group, D glycine or D alanine, cyclohexylalanine at amino terminus
  MISC_FEATURE (2)..(2): X is D and E for acidic amino acids
  MISC_FEATURE (3)..(3): X is A and G
  MISC_FEATURE (4)..(4): X is N or Q for amidated amino acids
  MISC_FEATURE (5)..(5): X is GabaX for X2X3 or X3X2 or X2X3 or X3X2 or X3X3 or X2X2
  MISC_FEATURE (6)..(6): X is K, R or H for basic amino acids
  MISC_FEATURE (7)..(7): X is A and G
  MISC_FEATURE (8)..(8): X is A and G
  MISC_FEATURE (9)..(9): X is GabaX for X2X3 or X3X2 or X2X3 or X3X2 or X3X3 or X2X2
  MISC_FEATURE (10)..(10): X is C or S
  MISC_FEATURE (11)..(11): X is T or S
  MISC_FEATURE (12)..(12): X is A and G
  MISC_FEATURE (13)..(13): X is GabaX for X2X3 or X3X2 or X2X3 or X3X2 or X3X3 or X2X2
  MISC_FEATURE (14)..(14): X is A and G
  MISC_FEATURE (15)..(15): X is A and G
  MISC_FEATURE (16)..(16): X is A and G
  MISC_FEATURE (17)..(17): X is A and G
  MISC_FEATURE (18)..(18): X is D and E for acidic amino acids
  MISC_FEATURE (19)..(19): X is A and G
  MISC_FEATURE (20)..(20): X is D and E for acidic amino acids
  MISC_FEATURE (21)..(21): X is A and G
  MISC_FEATURE (22)..(22): X is A and G
  MISC_FEATURE (23)..(23): X is K, R or H for basic amino acids
  MISC_FEATURE (24)..(24): X is F or P
  MISC_FEATURE (25)..(25): X is A and G
  MISC_FEATURE (26)..(26): X is K, R or H for basic amino acids
  MISC_FEATURE (27)..(27): X is A and G
  MISC_FEATURE (28)..(28): X is A and G
  MISC_FEATURE (29)..(29): X is D and E for acidic amino acids
  MISC_FEATURE (30)..(30): X is K, R or H for basic amino acids
  MISC_FEATURE (31)..(31): X is A and G
  MISC_FEATURE (32)..(32): X is F or P
  MISC_FEATURE (33)..(33): X is F or P
  MISC_FEATURE (34)..(34): X is A and G
  MISC_FEATURE (35)..(35): X is F or P
  MISC_FEATURE (36)..(36): X is N or Q for amidated amino acids
  MISC_FEATURE (37)..(37): X is A and G

SEQ ID NO: 782 - protein, 33 aa, Artificial
  Completely synthesized peptide construct
DLLKNGERIEKVEGGGSVKLSIAVKNKAEFHQS

SEQ ID NO: 783 - protein, 33 aa, Artificial; identical to SEQ ID NO: 97
  Completely synthesized peptide construct
  MISC_FEATURE (1)..(1): X is D and E for acidic amino acids
  MISC_FEATURE (2)..(2): X is I, L or V
  MISC_FEATURE (3)..(3): X is I, L or V
  MISC_FEATURE (4)..(4): X is K, R or H for basic amino acids
  MISC_FEATURE (5)..(5): X is N or Q for amidated amino acids
  MISC_FEATURE (6)..(6): X is A and G
  MISC_FEATURE (7)..(7): X is D and E for acidic amino acids
  MISC_FEATURE (8)..(8): X is K, R or H for basic amino acids
  MISC_FEATURE (9)..(9): X is I, L or V
  MISC_FEATURE (10)..(10): X is D and E for acidic amino acids
  MISC_FEATURE (11)..(11): X is K, R or H for basic amino acids
  MISC_FEATURE (12)..(12): X is I, L or V
  MISC_FEATURE (13)..(13): X is D and E for acidic amino acids
  MISC_FEATURE (14)..(14): X is A and G
  MISC_FEATURE (15)..(15): X is A and G
  MISC_FEATURE (16)..(16): X is A and G
  MISC_FEATURE (17)..(17): X is T or S
  MISC_FEATURE (18)..(18): X is I, L or V
  MISC_FEATURE (19)..(19): X is K, R or H for basic amino acids
  MISC_FEATURE (20)..(20): X is I, L or V
  MISC_FEATURE (21)..(21): X is T or S
  MISC_FEATURE (22)..(22): X is I, L or V
  MISC_FEATURE (23)..(23): X is A and G
  MISC_FEATURE (24)..(24): X is I, L or V
  MISC_FEATURE (25)..(25): X is K, R or H for basic amino acids
  MISC_FEATURE (26)..(26): X is N or Q for amidated amino acids
  MISC_FEATURE (27)..(27): X is K, R or H for basic amino acids
  MISC_FEATURE (28)..(28): X is A and G
  MISC_FEATURE (29)..(29): X is D and E for acidic amino acids
  MISC_FEATURE (30)..(30): X is F or P
  MISC_FEATURE (31)..(31): X is K, R or H for basic amino acids
  MISC_FEATURE (32)..(32): X is N or Q for amidated amino acids
  MISC_FEATURE (33)..(33): X is T or S

SEQ ID NO: 784 - protein, 33 aa, Artificial
  Completely synthesized peptide construct
DLLKNGERIEKVEGGGNVREGIAFRPASKTFTV

SEQ ID NO: 785 - protein, 33 aa, Artificial; identical to SEQ ID NO: 97
  Completely synthesized peptide construct
  MISC_FEATURE (1)..(1): X is D and E for acidic amino acids
  MISC_FEATURE (2)..(2): X is I, L or V
  MISC_FEATURE (3)..(3): X is I, L or V
  MISC_FEATURE (4)..(4): X is K, R or H for basic amino acids
  MISC_FEATURE (5)..(5): X is N or Q for amidated amino acids
  MISC_FEATURE (6)..(6): X is A and G
  MISC_FEATURE (7)..(7): X is D and E for acidic amino acids
  MISC_FEATURE (8)..(8): X is K, R or H for basic amino acids
  MISC_FEATURE (9)..(9): X is I, L or V
  MISC_FEATURE (10)..(10): X is D and E for acidic amino acids
  MISC_FEATURE (11)..(11): X is K, R or H for basic amino acids
  MISC_FEATURE (12)..(12): X is I, L or V
  MISC_FEATURE (13)..(13): X is D and E for acidic amino acids
  MISC_FEATURE (14)..(14): X is A and G
  MISC_FEATURE (15)..(15): X is A and G
  MISC_FEATURE (16)..(16): X is A and G
  MISC_FEATURE (17)..(17): X is  N or Q for amidated amino acids
  MISC_FEATURE (18)..(18): X is I, L or V
  MISC_FEATURE (19)..(19): X is K, R or H for basic amino acids
  MISC_FEATURE (20)..(20): X is D and E for acidic amino acids
  MISC_FEATURE (21)..(21): X is A and G
  MISC_FEATURE (22)..(22): X is I, L or V
  MISC_FEATURE (23)..(23): X is A and G
  MISC_FEATURE (24)..(24): X is F or P
  MISC_FEATURE (25)..(25): X is K, R or H for basic amino acids
  MISC_FEATURE (26)..(26): X is F or P
  MISC_FEATURE (27)..(27): X is A and G
  MISC_FEATURE (28)..(28): X is T or S
  MISC_FEATURE (29)..(29): X is K, R or H for basic amino acids
  MISC_FEATURE (30)..(30): X is T or S
  MISC_FEATURE (31)..(31): X is F or P
  MISC_FEATURE (32)..(32): X is T or S
  MISC_FEATURE (33)..(33): X is I, L or V

SEQ ID NO: 786 - protein, 36 aa, Artificial
  Completely synthesized peptide construct
DLLKNGERIEKVEGGGGPTHLFQPSLVLDMAKVLLD

SEQ ID NO: 787 - protein, 36 aa, Artificial; identical to SEQ ID NO: 164
  Completely synthesized peptide construct
  MISC_FEATURE (1)..(1): X is D and E for acidic amino acids
  MISC_FEATURE (2)..(2): X is I, L or V
  MISC_FEATURE (3)..(3): X is I, L or V
  MISC_FEATURE (4)..(4): X is K, R or H for basic amino acids
  MISC_FEATURE (5)..(5): X is N or Q for amidated amino acids
  MISC_FEATURE (6)..(6): X is A and G
  MISC_FEATURE (7)..(7): X is D and E for acidic amino acids
  MISC_FEATURE (8)..(8): X is K, R or H for basic amino acids
  MISC_FEATURE (9)..(9): X is I, L or V
  MISC_FEATURE (10)..(10): X is D and E for acidic amino acids
  MISC_FEATURE (11)..(11): X is K, R or H for basic amino acids
  MISC_FEATURE (12)..(12): X is I, L or V
  MISC_FEATURE (13)..(13): X is D and E for acidic amino acids
  MISC_FEATURE (14)..(14): X is A and G
  MISC_FEATURE (15)..(15): X is A and G
  MISC_FEATURE (16)..(16): X is A and G
  MISC_FEATURE (17)..(17): X is A and G
  MISC_FEATURE (18)..(18): X is F or P
  MISC_FEATURE (19)..(19): X is T or S
  MISC_FEATURE (20)..(20): X is K, R or H for basic amino acids
  MISC_FEATURE (21)..(21): X is I, L or V
  MISC_FEATURE (22)..(22): X is F, W or Y for aromatic amino acids
  MISC_FEATURE (23)..(23): X is N or Q for amidated amino acids
  MISC_FEATURE (24)..(24): X is F or P
  MISC_FEATURE (25)..(25): X is T or S
  MISC_FEATURE (26)..(26): X is I, L or V
  MISC_FEATURE (27)..(27): X is I, L or V
  MISC_FEATURE (28)..(28): X is I, L or V
  MISC_FEATURE (29)..(29): X is D and E for acidic amino acids
  MISC_FEATURE (30)..(30): X is M or Nle (Norleucine)
  MISC_FEATURE (31)..(31): X is A and G
  MISC_FEATURE (32)..(32): X is K, R or H for basic amino acids
  MISC_FEATURE (33)..(33): X is I, L or V
  MISC_FEATURE (34)..(34): X is I, L or V
  MISC_FEATURE (35)..(35): X is I, L or V
  MISC_FEATURE (36)..(36): X is D and E for acidic amino acids

SEQ ID NO: 788 - protein, 35 aa, artificial
  Completely synthesized peptide construct
DGQEEKAGVVSTGLIGGGSVKLSIAVKNKAEFHQS

SEQ ID NO: 789 - protein, 33 aa, artificial; identical to SEQ ID NO: 97
  Completely synthesized peptide construct
  MISC_FEATURE (1)..(1): X is acetyl or propionyl group, D glycine or D alanine, cyclohexylalanie at amino terminus
  MISC_FEATURE (2)..(2): X is D and E for acidic amino acids
  MISC_FEATURE (3)..(3): X is A and G
  MISC_FEATURE (4)..(4): X is N or Q for amidated amino acids
  MISC_FEATURE (5)..(5): X is GabaX for X2X3 or X3X2 or X2X3 or X3X2 or X3X3 or X2X2
  MISC_FEATURE (6)..(6): X is K, R or H for basic amino acids
  MISC_FEATURE (7)..(7): X is A and G
  MISC_FEATURE (8)..(8): X is A and G
  MISC_FEATURE (9)..(9): X is GabaX for X2X3 or X3X2 or X2X3 or X3X2 or X3X3 or X2X2
  MISC_FEATURE (10)..(10): X is C or S
  MISC_FEATURE (11)..(11): X is T or S
  MISC_FEATURE (12)..(12): X is A and G
  MISC_FEATURE (13)..(13): X is GabaX for X2X3 or X3X2 or X2X3 or X3X2 or X3X3 or X2X2
  MISC_FEATURE (14)..(14): X is A and G
  MISC_FEATURE (15)..(15): X is A and G
  MISC_FEATURE (16)..(16): X is A and G
  MISC_FEATURE (17)..(17): X is T or S
  MISC_FEATURE (18)..(18): X is I, L or V
  MISC_FEATURE (19)..(19): X is K, R or H for basic amino acids
  MISC_FEATURE (20)..(20): X is I, L or V
  MISC_FEATURE (21)..(21): X is T or S
  MISC_FEATURE (22)..(22): X is I, L or V
  MISC_FEATURE (23)..(23): X is A and G
  MISC_FEATURE (24)..(24): X is I, L or V
  MISC_FEATURE (25)..(25): X is K, R or H for basic amino acids
  MISC_FEATURE (26)..(26): X is N or Q for amidated amino acids
  MISC_FEATURE (27)..(27): X is K, R or H for basic amino acids
  MISC_FEATURE (28)..(28): X is A and G
  MISC_FEATURE (29)..(29): X is D and E for acidic amino acids
  MISC_FEATURE (30)..(30): X is F or P
  MISC_FEATURE (31)..(31): X is K, R or H for basic amino acids
  MISC_FEATURE (32)..(32): X is N or Q for amidated amino acids
  MISC_FEATURE (33)..(33): X is T or S

SEQ ID NO: 790 - protein, 35 aa, artificial
  Completely synthesized peptide construct
DGQEEKAGVVSTGLIGGGNVREGIAFRPASKTFTV

SEQ ID NO: 791 - protein, 33 aa, artificial; identical to SEQ ID NO: 97
  Completely synthesized peptide construct
  MISC_FEATURE (1)..(1): X is acetyl or propiionyl group, D glycine or D alanine, cyclohexylalanine at amino terminus
  MISC_FEATURE (2)..(2): X is D and E for acidic amino acids
  MISC_FEATURE (3)..(3): X is A and G
  MISC_FEATURE (4)..(4): X is N or Q for amidated amino acids
  MISC_FEATURE (5)..(5): X is GabaX for X2X3 or X3X2 or X2X3 or X3X2 or X3X3 or X2X2
  MISC_FEATURE (6)..(6): X is K, R or H for basic amino acids
  MISC_FEATURE (7)..(7): X is A and G
  MISC_FEATURE (8)..(8): X is A and G
  MISC_FEATURE (9)..(9): X is GabaX for X2X3 or X3X2 or X2X3 or X2X2 or X3X3 or X2X2
  MISC_FEATURE (10)..(10): X is C or S
  MISC_FEATURE (11)..(11): X is T or S
  MISC_FEATURE (12)..(12): X is A and G
  MISC_FEATURE (13)..(13): X is GabaX for X2X3 or X3X2 or X2X3 or X3X2 or X3X3 or X2X2
  MISC_FEATURE (14)..(14): X is A and G
  MISC_FEATURE (15)..(15): X is A and G
  MISC_FEATURE (16)..(16): X is A and G
  MISC_FEATURE (17)..(17): X is T or S
  MISC_FEATURE (18)..(18): X is I, L or V
  MISC_FEATURE (19)..(19): X is K, R or H for basic amino acids
  MISC_FEATURE (20)..(20): X is I, L or V
  MISC_FEATURE (21)..(21): X is T or S
  MISC_FEATURE (22)..(22): X is I, L or V
  MISC_FEATURE (23)..(23): X is A and G
  MISC_FEATURE (24)..(24): X is I, L or V
  MISC_FEATURE (25)..(25): X is K, R or H for basic amino acids
  MISC_FEATURE (26)..(26): X is N or Q for amidated amino acids
  MISC_FEATURE (27)..(27): X is K, R or H for basic amino acids
  MISC_FEATURE (28)..(28): X is A and G
  MISC_FEATURE (29)..(29): X is D and E for acidic amino acids
  MISC_FEATURE (30)..(30): X is F or P
  MISC_FEATURE (31)..(31): X is K, R or H for basic amino acids
  MISC_FEATURE (32)..(32): X is N or Q for amidated amino acids
  MISC_FEATURE (33)..(33): X is T or S

SEQ ID NO: 792 - protein, 38 aa, artificial
  Completely synthesized peptide construct
DGQEEKAGVVSTGLIGGGGPTHLFQPSLVLDMAKVLLD

SEQ ID NO: 793 - protein, 36 aa, artificial; identical to SEQ ID NO: 164
  Completely synthesized peptide construct
  MISC_FEATURE (1)..(1): X is acetyl or propionyl group, D glycine or D alanine, cyclohexylalanine at amino terminus
  MISC_FEATURE (2)..(2): X is D and E for acidic amino acids
  MISC_FEATURE (3)..(3): X is A and G
  MISC_FEATURE (4)..(4): X is N or Q for amidated amino acids
  MISC_FEATURE (5)..(5): X is GabaX for X2X3 or X3X2 or X2X3 or X3X2 or X3X3 or X2X2
  MISC_FEATURE (6)..(6): X is K, R or H for basic amino acids
  MISC_FEATURE (7)..(7): X is A and G
  MISC_FEATURE (8)..(8): X is A and G
  MISC_FEATURE (9)..(9): X is GabaX for X2X3 or X3X2 or X2X3 or X3X2 or X3X3 or X2X2
  MISC_FEATURE (10)..(10): X is C or S
  MISC_FEATURE (11)..(11): X is T or S
  MISC_FEATURE (12)..(12): X is A and G
  MISC_FEATURE (13)..(13): X is GabaX for X2X3 or X3X2 or X2X3 or X3X2 or X3X3 or X2X2
  MISC_FEATURE (14)..(14): X is A and G
  MISC_FEATURE (15)..(15): X is A and G
  MISC_FEATURE (16)..(16): X is A and G
  MISC_FEATURE (17)..(17): X is A and G
  MISC_FEATURE (18)..(18): X is F or P
  MISC_FEATURE (19)..(19): X is T or S
  MISC_FEATURE (20)..(20): X is K, R or H for basic amino acids
  MISC_FEATURE (21)..(21): X is I, L or V
  MISC_FEATURE (22)..(22): X is F, W or Y for aromatic amino acids
  MISC_FEATURE (23)..(23): X is N or Q for amidated amino acids
  MISC_FEATURE (24)..(24): X is F or P
  MISC_FEATURE (25)..(25): X is T or S
  MISC_FEATURE (26)..(26): X is I, L or V
  MISC_FEATURE (27)..(27): X is I, L or V
  MISC_FEATURE (28)..(28): X is I, L or V
  MISC_FEATURE (29)..(29): x is D and E for acidic amino acids
  MISC_FEATURE (30)..(30): X is M or Nle (Norleucine)
  MISC_FEATURE (31)..(31): X is A and G
  MISC_FEATURE (32)..(32): X is K, R or H for basic amino acids
  MISC_FEATURE (33)..(33): X is I, L or V
  MISC_FEATURE (34)..(34): X is I, L or V
  MISC_FEATURE (35)..(35): X is I, L or V
  MISC_FEATURE (36)..(36): X is D and E for acidic amino acids

SEQ ID NO: 794 - protein, 23 aa, artificial
  Completely synthesized peptide construct
VQGEESNDKGGGNITEIADLTQK

SEQ ID NO: 795 - protein, 23 aa, artificial
  Completely synthesized peptide construct
  MISC_FEATURE (1)..(1): X is I, L or V
  MISC_FEATURE (2)..(2): X is N or Q for amidated amino acids
  MISC_FEATURE (3)..(3): X is A and G
  MISC_FEATURE (4)..(4): X is D and E for acidic amino acids
  MISC_FEATURE (5)..(5): X is D and E for acidic amino acids
  MISC_FEATURE (6)..(6): X is C or S
  MISC_FEATURE (7)..(7): X is N or Q for amidated amino acids
  MISC_FEATURE (8)..(8): X is D and E for acidic amino acids
  MISC_FEATURE (9)..(9): X is K, R or H for basic amino acids
  MISC_FEATURE (10)..(10): X is A and G
  MISC_FEATURE (11)..(11): X is A and G
  MISC_FEATURE (12)..(12): X is A and G
  MISC_FEATURE (13)..(13): X is N or Q for amidated amino acids
  MISC_FEATURE (14)..(14): X is I, L or V
  MISC_FEATURE (15)..(15): X is T or S
  MISC_FEATURE (16)..(16): X is D and E for acidic amino acids
  MISC_FEATURE (17)..(17): X is I, L or V
  MISC_FEATURE (18)..(18): X is A and G
  MISC_FEATURE (19)..(19): X is D and E for acidic amino acids
  MISC_FEATURE (20)..(20): X is I, L or V
  MISC_FEATURE (21)..(21): X is T or S
  MISC_FEATURE (22)..(22): X is N or Q for amidated amino acids
  MISC_FEATURE (23)..(23): X is K, R or H for basic amino acids
XXXXXXXXXXXXXXXXXXXXXXX

SEQ ID NO: 796 - protein, 27 aa, artificial
  Completely synthesized peptide construct
DLLKNGERIEKVEGGGNITEIADLTQK

SEQ ID NO: 797 - protein, 24 aa, artificial
  Completely synthesized peptide construct
  MISC_FEATURE (1)..(1): X is acetyl or propionyl group, D glycine or D alanine, cyclohexylalanine at amino terminus
  MISC_FEATURE (2)..(2): X is GabaX for X2X3 or X3X2 or X2X3 or X3X2 or X3X3 or X2X2
  MISC_FEATURE (3)..(3): X is K, R or H for basic amino acids
  MISC_FEATURE (4)..(4): X is N or Q for amidated amino acids
  MISC_FEATURE (5)..(5): X is A and G
  MISC_FEATURE (6)..(6): X is D and E for acidic amino acids
  MISC_FEATURE (7)..(7): X is K, R or H for basic amino acids
  MISC_FEATURE (8)..(8): X is GabaX for X2X3 or X3X2 or X2X3 or X3X2 or X3 X3 or X2X2
  MISC_FEATURE (9)..(9): X is K, R or H for basic amino acids
  MISC_FEATURE (10)..(10): X is GabaX for X2X3 or X3X2 or X2X3 or X3X2 or X3X3 or X2X2
  MISC_FEATURE (11)..(11): X is A and G
  MISC_FEATURE (12)..(12): X is A and G
  MISC_FEATURE (13)..(13): X is A and G
  MISC_FEATURE (14)..(14): X is N or Q for amidated amino acids
  MISC_FEATURE (15)..(15): X is I, L or V
  MISC_FEATURE (16)..(16): X is T or S
  MISC_FEATURE (17)..(17): X is D and E for acidic amino acids
  MISC_FEATURE (18)..(18): X is I, L or V
  MISC_FEATURE (19)..(19): X is A and G
  MISC_FEATURE (20)..(20): X is D and E for acidic amino acids
  MISC_FEATURE (21)..(21): X is I, L or V
  MISC_FEATURE (22)..(22): X is T or S
  MISC_FEATURE (23)..(23): X is N or Q for amidated amino acids
  MISC_FEATURE (24)..(24): X is K, R or H for basic amino acids
XXXXXXXXXXXXXXXXXXXXXXXX

SEQ ID NO: 798 - protein, 32 aa, artificial
  Completely synthesized peptide construct
VQGEESNDKGGGGPTHLFQPSLVLDMAKVLLD

SEQ ID NO: 799 - protein, 30 aa, artificial; identical to SEQ ID NO: 56
  Completely synthesized peptide construct
  MISC_FEATURE (1)..(1): X is I, L or V
  MISC_FEATURE (2)..(2): X is N or Q for amidated amino acids
  MISC_FEATURE (3)..(3): X is A and G
  MISC_FEATURE (4)..(4): X is D and E for acidic amino acids
  MISC_FEATURE (5)..(5): X is D and E for acidic amino acids
  MISC_FEATURE (6)..(6): X is C or S
  MISC_FEATURE (7)..(7): X is N or Q for amidated amino acids
  MISC_FEATURE (8)..(8): X is D and E for acidic amino acids
  MISC_FEATURE (9)..(9): X is K, R or H for basic amino acids
  MISC_FEATURE (10)..(10): X is A and G
  MISC_FEATURE (11)..(11): X is A and G
  MISC_FEATURE (12)..(12): X is A and G
  MISC_FEATURE (13)..(13): X is A and G
  MISC_FEATURE (14)..(14): X is F or P
  MISC_FEATURE (15)..(15): X is T or S
  MISC_FEATURE (16)..(16): X is K, R or H for basic amino acids
  MISC_FEATURE (17)..(17): X is I, L or V
  MISC_FEATURE (18)..(18): X is F, W or Y for aromatic amino acids
  MISC_FEATURE (19)..(19): X is N or Q for amidated amino acids
  MISC_FEATURE (20)..(20): X is F or P
  MISC_FEATURE (21)..(21): X is T or S
  MISC_FEATURE (22)..(22): X is I, L or V
  MISC_FEATURE (23)..(23): X is I, L or V
  MISC_FEATURE (24)..(24): X is I, L or V
  MISC_FEATURE (25)..(25): X is D and E for acidic amino acids
  MISC_FEATURE (26)..(26): X is M or Nle (Norleucine)
  MISC_FEATURE (27)..(27): X is A and G
  MISC_FEATURE (28)..(28): X is K, R or H for basic amino acids
  MISC_FEATURE (29)..(29): X is 5-aminopentanoic acid for replacement of 3 or 4 amino acids of X2 or X3
  MISC_FEATURE (30)..(30): X is D and E for acidic amino acids

SEQ ID NO: 800 - protein, 31 aa, artificial
  Completely synthesized peptide construct
DLLKNGERIEKVEGGGDGQEEKAGVVSTGLI

SEQ ID NO: 801 - protein, 24 aa, artificial
  Completely synthesized peptide construct
  MISC_FEATURE (1)..(1): X is acetyl or propionyl group, D glycine or D alanine, cyclohexylalanine at amino terminus
  MISC_FEATURE (2)..(2): X is GabaX for X2X3 or X3X2 or X2X3 or X3X2 or X3X3 or X2X2
  MISC_FEATURE (3)..(3): X is K, R or H for basic amino acids
  MISC_FEATURE (4)..(4): X is N or Q for amidated amino acids
  MISC_FEATURE (5)..(5): X is A and G
  MISC_FEATURE (6)..(6): X is D and E for acidic amino acids
  MISC_FEATURE (7)..(7): X is K, R or H for basic amino acids
  MISC_FEATURE (8)..(8): X is GabaX for X2X3 or X3X2 or X2X3 or X3X2 or X3X3 or X2X2
  MISC_FEATURE (9)..(9): X is K, R or H for basic amino acids
  MISC_FEATURE (10)..(10): X is GabaX for X2X3 or X3X2 or X2X3 or X3X2 or X3X3 or X2X2
  MISC_FEATURE (11)..(11): X is A and G
  MISC_FEATURE (12)..(12): X is A and G
  MISC_FEATURE (13)..(13): X is A and G
  MISC_FEATURE (14)..(14): X is N or Q for amidated amino acids
  MISC_FEATURE (15)..(15): X is I, L or V
  MISC_FEATURE (16)..(16): X is T or S
  MISC_FEATURE (17)..(17): X is D and E for acidic amino acids
  MISC_FEATURE (18)..(18): X is I, L or V
  MISC_FEATURE (19)..(19): X is A and G
  MISC_FEATURE (20)..(20): D and E for acidic amino acids
  MISC_FEATURE (21)..(21): X is I, L or V
  MISC_FEATURE (22)..(22): X is T or S
  MISC_FEATURE (23)..(23): X is N or Q for amidated amino acids
  MISC_FEATURE (24)..(24): X is K, R or H for basic amino acids
XXXXXXXXXXXXXXXXXXXXXXXX

SEQ ID NO: 802 - protein, 27 aa, artificial
  Completely synthesized peptide construct
VQGEESNDKGGGDGQEEKAGVVSTGLI

SEQ ID NO: 803 - protein, 23 aa, artificial
  Completely synthesized peptide construct
  MISC_FEATURE (1)..(1): X is I, L or V
  MISC_FEATURE (2)..(2): X is N or Q for amidated amino acids
  MISC_FEATURE (3)..(3): X is A and G
  MISC_FEATURE (4)..(4): X is D and E for acidic amino acids
  MISC_FEATURE (5)..(5): X is D and E for acidic amino acids
  MISC_FEATURE (6)..(6): X is C or S
  MISC_FEATURE (7)..(7): X is N or Q for amidated amino acids
  MISC_FEATURE (8)..(8): X is D and E for acidic amino acids
  MISC_FEATURE (9)..(9): X is K, R or H for basic amino acids
  MISC_FEATURE (10)..(10): X is A and G
  MISC_FEATURE (11)..(11): X is A and G
  MISC_FEATURE (12)..(12): X is A and G
  MISC_FEATURE (13)..(13): X is N or Q for amidated amino acids
  MISC_FEATURE (14)..(14): X is I, L or V
  MISC_FEATURE (15)..(15): X is T or S
  MISC_FEATURE (16)..(16): X is D and E for acidic amino acids
  MISC_FEATURE (17)..(17): X is I, L or V
  MISC_FEATURE (18)..(18): X is A and G
  MISC_FEATURE (19)..(19): X is D and E for acidic amino acids
  MISC_FEATURE (20)..(20): X is I, L or V
  MISC_FEATURE (21)..(21): X is T or S
  MISC_FEATURE (22)..(22): X is N or Q for amidated amino acids
  MISC_FEATURE (23)..(23): X is K, R or H for basic amino acids
XXXXXXXXXXXXXXXXXXXXXXX

SEQ ID NO: 804 - protein, 34 aa, artificial
  Completely synthesized peptide construct
DLLKNGERIEKVEGGGSVDRSGNVHHQFQKLTLE

SEQ ID NO: 805 - protein, 121 aa, artificial
  Completely synthesized peptide construct
  MISC_FEATURE (1)..(1): X is acetyl or propionyl group, D glycine or D alanine, cyclohexylalanine at amino terminus
  MISC_FEATURE (2)..(2): X is GabaX for X2X3 or X3X2 or X2X3 or X3X2 or X3X3 or X2X2
  MISC_FEATURE (3)..(3): X is K, R or H for basic amino acids
  MISC_FEATURE (4)..(4): X is N or Q for amidated amino acids
  MISC_FEATURE (5)..(5): X is A and G
  MISC_FEATURE (6)..(6): X is D and E for acidic amino acids
  MISC_FEATURE (7)..(7): X is K, R or H for basic amino acids
  MISC_FEATURE (8)..(8): X is GabaX for X2X3 or X3X2 or X2X3 or X3X2 or X3X3 or X2X2
  MISC_FEATURE (9)..(9): X is K, R or H for basic amino acids
  MISC_FEATURE (10)..(10): X is GabaX for X2X3 or X3X2 or X2X3 or X3X2 or X3X3 or X2X2
  MISC_FEATURE (11)..(11): X is A and G
  MISC_FEATURE (12)..(12): X is A and G
  MISC_FEATURE (13)..(13): X is A and G
XXXXXXXXXXXXXKKPGESLKISCQGSGYNFNTYYIAWVRHMPGYGLEWMGIIYPDDSTIRYSPSFQGQVTISADKSTTTAYLQWNSLKASDTAMYYCARRVASALSYWYFDLWGQGTLVT

SEQ ID NO: 806 - protein, 36 aa, artificial
  Completely synthesized peptide construct
DGQEEKAGVVSTGLIGGGSVDRSGNVHHQFQKLTLE

SEQ ID NO: 807 - protein, 95 aa, artificial
  Completely synthesized peptide construct
LVWKKQKDKVAELENSEGGGLEWMGIIYPDDSTIRYSPSFQGQVTISADKSTTTAYLQWNSLKASDTAMYYCARRVASALSYWYFDLWGQGTLVT

SEQ ID NO: 808 - protein, 30 aa, artificial
  Completely synthesized peptide construct
VQGEESNDKGGGSVDRSGNVHHQFQKLTLE

SEQ ID NO: 809 - protein, 88 aa, artificial
  Completely synthesized peptide construct
  MISC_FEATURE (1)..(1): X is acetyl or propionyl group, D glycine or D alanine, cyclohexylalanine at amino terminus
  MISC_FEATURE (2)..(2): X is I, L or V
  MISC_FEATURE (3)..(3): X is N or Q for amidated amino acids
  MISC_FEATURE (4)..(4): X is A and G
  MISC_FEATURE (5)..(5): X is D and E for acidic amino acids
  MISC_FEATURE (6)..(6): X is D and E for acidic amino acids
  MISC_FEATURE (7)..(7): X is C or S
  MISC_FEATURE (8)..(8): X is N or Q for amidated amino acids
  MISC_FEATURE (9)..(9): X is D and E for acidic amino acids
  MISC_FEATURE (10)..(10): X is K, R or H for basic amino acids
  MISC_FEATURE (11)..(11): X is A and G
  MISC_FEATURE (12)..(12): X is A and G
  MISC_FEATURE (13)..(13): X is A and G
XXXXXXXXXXXXXLEWMGIIYPDDSTIRYSPSFQGQVTISADKSTTTAYLQWNSLKASDTAMYYCARRVASALSYWYFDLWGQGTLVT

SEQ ID NO: 810 - protein, 28 aa, artificial
  Completely synthesized peptide construct
DQTQDTEGGGSVDRSGNVHHQFQKLTLE

SEQ ID NO: 811 - protein, 30 aa, artificial
  Completely synthesized peptide construct
AYMTMKIRNGGGSVDRSGNVHHQFQKLTLE

SEQ ID NO: 812 - protein, 20 aa, Homo sapiens
TGGKPGIAGFKGEQGPKGEP

SEQ ID NO: 813 - protein, 20 aa, artificial
  Completely synthesized peptide construct
  MISC_FEATURE (1)..(1): X is T or S
  MISC_FEATURE (2)..(2): X is A and G
  MISC_FEATURE (3)..(3): X is A and G
  MISC_FEATURE (4)..(4): X is K, R or H for basic amino acids
  MISC_FEATURE (5)..(5): X is F or P
  MISC_FEATURE (6)..(6): X is A and G
  MISC_FEATURE (7)..(7): X is I, L or V
  MISC_FEATURE (8)..(8): X is A and G
  MISC_FEATURE (9)..(9): X is A and G
  MISC_FEATURE (10)..(10): X is F, W or Y for aromatic amino acids
  MISC_FEATURE (11)..(11): X is K, R or H for basic amino acids
  MISC_FEATURE (12)..(12): X is A and G
  MISC_FEATURE (13)..(13): X is D and E for acidic amino acids
  MISC_FEATURE (14)..(14): X is N or Q for amidated amino acids
  MISC_FEATURE (15)..(15): X is A and G
  MISC_FEATURE (16)..(16): X is F or P
  MISC_FEATURE (17)..(17): X is K, R or H for basic amino acids
  MISC_FEATURE (18)..(18): X is A and G
  MISC_FEATURE (19)..(19): X is D and E for acidic amino acids
  MISC_FEATURE (20)..(20): X is F or P
XXXXXXXXXXXXXXXXXXXX

SEQ ID NO: 814 - protein, 15 aa, artificial
  Completely synthesized peptide construct
  MISC_FEATURE (1)..(1): X is T or S
  MISC_FEATURE (2)..(2): X is X1X1 or X1X3 or X3X1 or X1X2 or X2X1
  MISC_FEATURE (3)..(3): X is K, R or H for basic amino acids
  MISC_FEATURE (4)..(4): X is F or P
  MISC_FEATURE (5)..(5): X is GabaX for X2X3 or X3X2 or X2X3 or X3X2 or X3X3 or X2X2
  MISC_FEATURE (5)..(5): X is Gaba for X2X3 or X3X2 or X2X3 or X3X2 or X3X3 or X2X2
  MISC_FEATURE (6)..(6): X is X1X1 or X1X3 or X3X1 or X1X2 or X2X1
  MISC_FEATURE (7)..(7): X is F, W or Y for aromatic amino acids
  MISC_FEATURE (8)..(8): X is K, R or H for basic amino acids
  MISC_FEATURE (9)..(9): X is X1X1 or X1X3 or X3X1 or X1X2 or X2X1
  MISC_FEATURE (10)..(10): X is N or Q for amidated amino acids
  MISC_FEATURE (11)..(11): X is A and G
  MISC_FEATURE (12)..(12): X is F or P
  MISC_FEATURE (13)..(13): X is K, R or H for basic amino acids
  MISC_FEATURE (14)..(14): X is X1X1 or X1X3 or X3X1 or X1X2 or X2X1
  MISC_FEATURE (15)..(15): X is F or P
XXXXXXXXXXXXXXX

SEQ ID NO: 815 - protein, 34 aa, artificial
  Completely synthesized peptide construct
PSTHVLITHTIGGGTGGKPGIAGFKGEQGPKGEP

SEQ ID NO: 816 - protein, 38 aa, artificial
  Completely synthesized peptide construct
DFLPHYKNTSLGHRPGGGTGGKPGIAGFKGEQGPKGEP

SEQ ID NO: 817 - protein, 40 aa, artificial
  Completely synthesized peptide construct
NGQEEKAGVVSTGLIGGGGSTGGKPGIAGFKGEQGPKGEP

SEQ ID NO: 818 - protein, 40 aa, artificial
  Completely synthesized peptide construct
DGQEEKAGVVSTGLIGGGGSTGGKPGIAGFKGEQGPKGEP

SEQ ID NO: 819 - protein, 38 aa, artificial
  Completely synthesized peptide construct
DGQEEKAGVVSTGLIGGGTGGKPGIAGFKGEQGPKGEP

SEQ ID NO: 820 - protein, 38 aa, artificial; identical to SEQ ID NO: 162
  Completely synthesized peptide construct
  MISC_FEATURE (1)..(1): X is D and E for acidic amino acids
  MISC_FEATURE (2)..(2): X is A and G
  MISC_FEATURE (3)..(3): X is N or Q for amidated amino acids
  MISC_FEATURE (4)..(4): X is D and E for acidic amino acids
  MISC_FEATURE (5)..(5): X is D and E for acidic amino acids
  MISC_FEATURE (6)..(6): X is K, R or H for basic amino acids
  MISC_FEATURE (7)..(7): X is A and G
  MISC_FEATURE (8)..(8): X is A and G
  MISC_FEATURE (9)..(9): X is I, L or V
  MISC_FEATURE (10)..(10): X is I, L or V
  MISC_FEATURE (11)..(11): X is C or S
  MISC_FEATURE (12)..(12): X is T or S
  MISC_FEATURE (13)..(13): X is A and G
  MISC_FEATURE (14)..(14): X is I, L or V
  MISC_FEATURE (15)..(15): X is I, L or V
  MISC_FEATURE (16)..(16): X is A and G
  MISC_FEATURE (17)..(17): X is A and G
  MISC_FEATURE (18)..(18): X is A and G
  MISC_FEATURE (19)..(19): X is T or S
  MISC_FEATURE (20)..(20): X is A and G
  MISC_FEATURE (21)..(21): X is A and G
  MISC_FEATURE (22)..(22): X is K, R or H for basic amino acids
  MISC_FEATURE (23)..(23): X is F or P
  MISC_FEATURE (24)..(24): X is A and G
  MISC_FEATURE (25)..(25): X is I, L or V
  MISC_FEATURE (26)..(26): X is A and G
  MISC_FEATURE (27)..(27): X is A and G
  MISC_FEATURE (28)..(28): X is F, W or Y for aromatic amino acids
  MISC_FEATURE (29)..(29): X is K, R or H for basic amino acids
  MISC_FEATURE (30)..(30): X is A and G
  MISC_FEATURE (31)..(31): X is D and E for acidic amino acids
  MISC_FEATURE (32)..(32): X is N or Q for amidated amino acids
  MISC_FEATURE (33)..(33): X is A and G
  MISC_FEATURE (34)..(34): X is F or P
  MISC_FEATURE (35)..(35): X is K, R or H for basic amino acids
  MISC_FEATURE (36)..(36): X is A and G
  MISC_FEATURE (37)..(37): X is D and E for acidic amino acids
  MISC_FEATURE (38)..(38): X is F or P

SEQ ID NO: 821 - protein, 39 aa, artificial; identical to SEQ ID NO: 176
  Completely synthesized peptide construct
  MISC_FEATURE (1)..(1): X is Acetyl or propionyl group, D glycine or D alanine, Cyclohexylalanine at amino terminus
  MISC_FEATURE (2)..(2): X is D and E for acidic amino acids
  MISC_FEATURE (3)..(3): X is A and G
  MISC_FEATURE (4)..(4): X is N or Q for amidated amino acids
  MISC_FEATURE (5)..(5): X is D and E for acidic amino acids
  MISC_FEATURE (6)..(6): X is D and E for acidic amino acids
  MISC_FEATURE (7)..(7): X is K, R or H for basic amino acids
  MISC_FEATURE (8)..(8): X is A and G
  MISC_FEATURE (9)..(9): X is A and G
  MISC_FEATURE (10)..(10): X is I, L or V
  MISC_FEATURE (11)..(11): X is I, L or V
  MISC_FEATURE (12)..(12): X is C or S
  MISC_FEATURE (13)..(13): X is T or S
  MISC_FEATURE (14)..(14): X is A and G
  MISC_FEATURE (15)..(15): X is I, L or V
  MISC_FEATURE (16)..(16): X is I, L or V
  MISC_FEATURE (17)..(17): X is A and G
  MISC_FEATURE (18)..(18): X is A and G
  MISC_FEATURE (19)..(19): X is A and G
  MISC_FEATURE (20)..(20): X is T or S
  MISC_FEATURE (21)..(21): X is A and G
  MISC_FEATURE (22)..(22): X is A and G
  MISC_FEATURE (23)..(23): X is K, R or H for basic amino acids
  MISC_FEATURE (24)..(24): X is F or P
  MISC_FEATURE (25)..(25): X is A and G
  MISC_FEATURE (26)..(26): X is I, L or V
  MISC_FEATURE (27)..(27): X is A and G
  MISC_FEATURE (28)..(28): X is A and G
  MISC_FEATURE (29)..(29): X is F, W or Y for aromatic amino acids
  MISC_FEATURE (30)..(30): X is K, R or H for basic amino acids
  MISC_FEATURE (31)..(31): X is A and G
  MISC_FEATURE (32)..(32): X is D and E for acidic amino acids
  MISC_FEATURE (33)..(33): X is N or Q for amidated amino acids
  MISC_FEATURE (34)..(34): X is A and G
  MISC_FEATURE (35)..(35): X is F or P
  MISC_FEATURE (36)..(36): X is K, R or H for basic amino acids
  MISC_FEATURE (37)..(37): X is A and G
  MISC_FEATURE (38)..(38): X is D and E for acidic amino acids
  MISC_FEATURE (39)..(39): X is F or P

SEQ ID NO: 822 - protein, 39 aa, artificial; identical to SEQ ID NO: 176
  Completely synthesized peptide construct
  MISC_FEATURE (1)..(1): X is 5-aminopentanoic acid for replacement of 3 or 4 amino acids of X2 and  X3
  MISC_FEATURE (2)..(2): X is D and E for acidic amino acids
  MISC_FEATURE (3)..(3): X is A and G
  MISC_FEATURE (4)..(4): X is N or Q for amidated amino acids
  MISC_FEATURE (5)..(5): X is D and E for acidic amino acids
  MISC_FEATURE (6)..(6): X is D and E for acidic amino acids
  MISC_FEATURE (7)..(7): X is K, R or H for basic amino acids
  MISC_FEATURE (8)..(8): X is A and G
  MISC_FEATURE (9)..(9): X is A and G
  MISC_FEATURE (10)..(10): X is I, L or V
  MISC_FEATURE (11)..(11): X is I, L or V
  MISC_FEATURE (12)..(12): X is C or S
  MISC_FEATURE (13)..(13): X is T or S
  MISC_FEATURE (14)..(14): X is A and G
  MISC_FEATURE (15)..(15): X is I, L or V
  MISC_FEATURE (16)..(16): X is I, L or V
  MISC_FEATURE (17)..(17): X is A and G
  MISC_FEATURE (18)..(18): X is A and G
  MISC_FEATURE (19)..(19): X is A and G
  MISC_FEATURE (20)..(20): X is T or S
  MISC_FEATURE (21)..(21): X is A and G
  MISC_FEATURE (22)..(22): X is A and G
  MISC_FEATURE (23)..(23): X is K, R or H for basic amino acids
  MISC_FEATURE (24)..(24): X is F or P
  MISC_FEATURE (25)..(25): X is A and G
  MISC_FEATURE (26)..(26): X is I, L or V
  MISC_FEATURE (27)..(27): X is A and G
  MISC_FEATURE (28)..(28): X is A and G
  MISC_FEATURE (29)..(29): X is F, W or Y for aromatic amino acids
  MISC_FEATURE (30)..(30): X is K, R or H for basic amino acids
  MISC_FEATURE (31)..(31): X is A and G
  MISC_FEATURE (32)..(32): X is D and E for acidic amino acids
  MISC_FEATURE (33)..(33): X is N or Q for amidated amino acids
  MISC_FEATURE (34)..(34): X is A and G
  MISC_FEATURE (35)..(35): X is F or P
  MISC_FEATURE (36)..(36): X is K, R or H for basic amino acids
  MISC_FEATURE (37)..(37): X is A and G
  MISC_FEATURE (38)..(38): X is D and E for acidic amino acids
  MISC_FEATURE (39)..(39): X is F or P

SEQ ID NO: 823 - protein, 36 aa, artificial; identical to SEQ ID NO: 164
  Completely synthesized peptide construct
  MISC_FEATURE (1)..(1): X is Acetyl or propionyl group, D glycine or D alanine, Cyclohexylalanine at amino terminus
  MISC_FEATURE (2)..(2): X is D and E for acidic amino acids
  MISC_FEATURE (3)..(3): X is A and G
  MISC_FEATURE (4)..(4): X is N or Q for amidated amino acids
  MISC_FEATURE (5)..(5): X is Gaba for X2X3 or X3X2 or X2X3 or X3X2 or X3X3 or X2X2
  MISC_FEATURE (6)..(6): X is K, R or H for basic amino acids
  MISC_FEATURE (7)..(7): X is A and G
  MISC_FEATURE (8)..(8): X is A and G
  MISC_FEATURE (9)..(9): X is Gaba for X2X3 or X3X2 or X2X3 or X3X2 or X3X3 or X2X2
  MISC_FEATURE (10)..(10): X is C or S
  MISC_FEATURE (11)..(11): X is T or S
  MISC_FEATURE (12)..(12): X is A and G
  MISC_FEATURE (13)..(13): X is Gaba for X2X3 or X3X2 or X2X3 or X3X2 or X3X3 or X2X2
  MISC_FEATURE (14)..(14): X is A and G
  MISC_FEATURE (15)..(15): X is A and G
  MISC_FEATURE (16)..(16): X is A and G
  MISC_FEATURE (17)..(17): X is T or S
  MISC_FEATURE (18)..(18): X is A and G
  MISC_FEATURE (19)..(19): X is A and G
  MISC_FEATURE (20)..(20): X is K, R or H for basic amino acids
  MISC_FEATURE (21)..(21): X is F or P
  MISC_FEATURE (22)..(22): X is A and G
  MISC_FEATURE (23)..(23): X is I, L or V
  MISC_FEATURE (24)..(24): X is A and G
  MISC_FEATURE (25)..(25): X is A and G
  MISC_FEATURE (26)..(26): X is F, W or Y for aromatic amino acids
  MISC_FEATURE (27)..(27): X is K, R or H for basic amino acids
  MISC_FEATURE (28)..(28): X is A and G
  MISC_FEATURE (29)..(29): X is D and E for acidic amino acids
  MISC_FEATURE (30)..(30): X is N or Q for amidated amino acids
  MISC_FEATURE (31)..(31): X is A and G
  MISC_FEATURE (32)..(32): X is F or P
  MISC_FEATURE (33)..(33): X is K, R or H for basic amino acids
  MISC_FEATURE (34)..(34): X is A and G
  MISC_FEATURE (35)..(35): X is D and E for acidic amino acids
  MISC_FEATURE (36)..(36): X is F or P

SEQ ID NO: 824 - protein, 33 aa, artificial; identical to SEQ ID NO: 97
  Completely synthesized peptide construct
  MISC_FEATURE (1)..(1): X is D and E for acidic amino acids
  MISC_FEATURE (2)..(2): X is A and G
  MISC_FEATURE (3)..(3): X is N or Q for amidated amino acids
  MISC_FEATURE (4)..(4): X is D and E for acidic amino acids
  MISC_FEATURE (5)..(5): X is D and E for acidic amino acids
  MISC_FEATURE (6)..(6): X is K, R or H for basic amino acids
  MISC_FEATURE (7)..(7): X is A and G
  MISC_FEATURE (8)..(8): X is A and G
  MISC_FEATURE (9)..(9): X is I, L or V
  MISC_FEATURE (10)..(10): X is I, L or V
  MISC_FEATURE (11)..(11): X is C or S
  MISC_FEATURE (12)..(12): X is T or S
  MISC_FEATURE (13)..(13): X is A and G
  MISC_FEATURE (14)..(14): X is I, L or V
  MISC_FEATURE (15)..(15): X is I, L or V
  MISC_FEATURE (16)..(16): X is A and G
  MISC_FEATURE (17)..(17): X is A and G
  MISC_FEATURE (18)..(18): X is A and G
  MISC_FEATURE (19)..(19): X is T or S
  MISC_FEATURE (20)..(20): X is X1X1 or X1X3 or X3X1 or X1X2 or X2X1
  MISC_FEATURE (21)..(21): X is K, R or H for basic amino acids
  MISC_FEATURE (22)..(22): X is F or P
  MISC_FEATURE (23)..(23): X is Gaba for X2 X3 or X3 X2 or X2X3 or X3X2 or X3X3 or X2X2
  MISC_FEATURE (24)..(24): X is X1X1 or X1X3 or X3X1 or X1X2 or X2X1
  MISC_FEATURE (25)..(25): X is F, W or Y for aromatic amino acids
  MISC_FEATURE (26)..(26): X is K, R or H for basic amino acids
  MISC_FEATURE (27)..(27): X is X1X1 or X1X3 or X3X1 or X1X2 or X2X1
  MISC_FEATURE (28)..(28): X is N or Q for amidated amino acids
  MISC_FEATURE (29)..(29): X is A and G
  MISC_FEATURE (30)..(30): X is F or P
  MISC_FEATURE (31)..(31): X is K, R or H for basic amino acids
  MISC_FEATURE (32)..(32): X is X1X1 or X1X3 or X3X1 or X1X2 or X2X1
  MISC_FEATURE (33)..(33): X is F or P

SEQ ID NO: 825 - protein, 34 aa, artificial; identical to SEQ ID NO: 77
  Completely synthesized peptide construct
  MISC_FEATURE (1)..(1): X is Acetyl or propionyl group, D glycine or D alanine, Cyclohexylalanine at amino terminus
  MISC_FEATURE (2)..(2): X is D and E for acidic amino acids
  MISC_FEATURE (3)..(3): X is A and G
  MISC_FEATURE (4)..(4): X is N or Q for amidated amino acids
  MISC_FEATURE (5)..(5): X is D and E for acidic amino acids
  MISC_FEATURE (6)..(6): X is D and E for acidic amino acids
  MISC_FEATURE (7)..(7): X is K, R or H for basic amino acids
  MISC_FEATURE (8)..(8): X is A and G
  MISC_FEATURE (9)..(9): X is A and G
  MISC_FEATURE (10)..(10): X is I, L or V
  MISC_FEATURE (11)..(11): X is I, L or V
  MISC_FEATURE (12)..(12): X is C or S
  MISC_FEATURE (13)..(13): X is T or S
  MISC_FEATURE (14)..(14): X is A and G
  MISC_FEATURE (15)..(15): X is I, L or V
  MISC_FEATURE (16)..(16): X is I, L or V
  MISC_FEATURE (17)..(17): X is A and G
  MISC_FEATURE (18)..(18): X is A and G
  MISC_FEATURE (19)..(19): X is A and G
  MISC_FEATURE (20)..(20): X is T or S
  MISC_FEATURE (21)..(21): X is X1X1 or X1X3 or X3X1 or X1X2 or X2X1
  MISC_FEATURE (22)..(22): X is K, R or H for basic amino acids
  MISC_FEATURE (23)..(23): X is F or P
  MISC_FEATURE (24)..(24): X is Gaba for X2X3 or X3X2 or X2X3 or X3X2 or X3X3 or X2X2
  MISC_FEATURE (25)..(25): X is X1X1 or X1X3 or X3X1 or X1X2 or X2X1
  MISC_FEATURE (26)..(26): X is F, W or Y for aromatic amino acids
  MISC_FEATURE (27)..(27): X is K, R or H for basic amino acids
  MISC_FEATURE (28)..(28): X is X1X1 or X1X3 or X3X1 or X1X2 or X2X1
  MISC_FEATURE (29)..(29): X is N or Q for amidated amino acids
  MISC_FEATURE (30)..(30): X is A and G
  MISC_FEATURE (31)..(31): X is F or P
  MISC_FEATURE (32)..(32): X is K, R or H for basic amino acids
  MISC_FEATURE (33)..(33): X is X1X1 or X1X3 or X3X1 or X1X2 or X2X1
  MISC_FEATURE (34)..(34): X is F or P

SEQ ID NO: 826 - protein, 34 aa, artificial; identical to SEQ ID NO: 77
  Completely synthesized peptide construct
  MISC_FEATURE (1)..(1): X is 5-aminopentanoic acid for replacement of 3 or 4 amino acids of X2 and  X3
  MISC_FEATURE (2)..(2): X is D and E for acidic amino acids
  MISC_FEATURE (3)..(3): X is A and G
  MISC_FEATURE (4)..(4): X is N or Q for amidated amino acids
  misc_feature (5)..(5): Xaa can be any naturally occurring amino acid
  MISC_FEATURE (6)..(6): X is D and E for acidic amino acids
  MISC_FEATURE (7)..(7): X is K, R or H for basic amino acids
  MISC_FEATURE (8)..(8): X is A and G
  MISC_FEATURE (9)..(9): X is A and G
  MISC_FEATURE (10)..(10): X is A and G
  MISC_FEATURE (11)..(11): X is I, L or V
  MISC_FEATURE (12)..(12): X is C or S
  MISC_FEATURE (13)..(13): X is T or S
  MISC_FEATURE (14)..(14): X is A and G
  MISC_FEATURE (15)..(15): X is I, L or V
  MISC_FEATURE (16)..(16): X is I, L or V
  misc_feature (17)..(17): Xaa can be any naturally occurring amino acid
  MISC_FEATURE (18)..(18): X is A and G
  MISC_FEATURE (19)..(19): X is A and G
  MISC_FEATURE (20)..(20): X is T or S
  MISC_FEATURE (21)..(21): X is X1X1 or X1X3 or X3X1 or X1X2 or X2X1
  MISC_FEATURE (22)..(22): X is K, R or H for basic amino acids
  MISC_FEATURE (23)..(23): X is F or P
  MISC_FEATURE (24)..(24): X is Gaba for X2X3 or X3X2 or X2X3 pr X3X2 or X3X3 or X2X2
  MISC_FEATURE (25)..(25): X is X1X1 or X1X3 or X3X1 or X1X2 or X2X1
  MISC_FEATURE (26)..(26): X is F, W or Y for aromatic amino acids
  MISC_FEATURE (27)..(27): X is K, R or H for basic amino acids
  MISC_FEATURE (28)..(28): X is X1X1 or X1X3 or X3X1 or X1X2 or X2X1
  MISC_FEATURE (29)..(29): X is N or Q for amidated amino acids
  MISC_FEATURE (30)..(30): X is A and G
  MISC_FEATURE (31)..(31): X is F or P
  MISC_FEATURE (32)..(32): X is K, R or H for basic amino acids
  MISC_FEATURE (33)..(33): X is X1X1 or X1X3 or X3X1 or X1X2 or X2X1
  MISC_FEATURE (34)..(34): X is F or P

SEQ ID NO: 827 - protein, 31 aa, artificial; identical to SEQ ID NO: 123
  Completely synthesized peptide construct
  MISC_FEATURE (1)..(1): X is Acetyl or propionyl group, D glycine or D alanine, Cyclohexylalanine at amino terminus
  MISC_FEATURE (2)..(2): X is D and E for acidic amino acids
  MISC_FEATURE (3)..(3): X is A and G
  MISC_FEATURE (4)..(4): X is N or Q for amidated amino acids
  MISC_FEATURE (5)..(5): X is Gaba for X2X3 or X3X3 or X2X3 or X3X2 or X3X3 or X2X2
  MISC_FEATURE (6)..(6): X is K, R or H for basic amino acids
  MISC_FEATURE (7)..(7): X is A and G
  MISC_FEATURE (8)..(8): X is A and G
  MISC_FEATURE (9)..(9): X is Gaba for X2X3 or X3X3 or X2X3 or X3X2 or X3X3 or X2X2
  MISC_FEATURE (10)..(10): X is C or S
  MISC_FEATURE (11)..(11): X is T or S
  MISC_FEATURE (12)..(12): X is A and G
  MISC_FEATURE (13)..(13): X is Gaba for X2X3 or X3X3 or X2X3 or X3X2 or X3X3 or X2X2
  MISC_FEATURE (14)..(14): X is A and G
  MISC_FEATURE (15)..(15): X is A and G
  MISC_FEATURE (16)..(16): X is A and G
  MISC_FEATURE (17)..(17): X is T or S
  MISC_FEATURE (18)..(18): X is X1X1 or X1X3 or X3X1 or X1X2 or X2X1
  MISC_FEATURE (19)..(19): X is K, R or H for basic amino acids
  MISC_FEATURE (20)..(20): X is F or P
  MISC_FEATURE (21)..(21): X is Gaba for X2X3 or X3X3 or X2X3 or X3X2 or X3X3 or X2X2
  MISC_FEATURE (22)..(22): X is X is X1X1 or X1X3 or X3X1 or X1X2 or X2X1
  MISC_FEATURE (23)..(23): X is F, W or Y for aromatic amino acids
  MISC_FEATURE (24)..(24): X is K, R or H for basic amino acids
  MISC_FEATURE (25)..(25): X is X is X1X1 or X1X3 or X3X1 or X1X2 or X2X1
  MISC_FEATURE (26)..(26): X is N or Q for amidated amino acids
  MISC_FEATURE (27)..(27): X is A and G
  MISC_FEATURE (28)..(28): X is F or P
  MISC_FEATURE (29)..(29): X is K, R or H for basic amino acids
  MISC_FEATURE (30)..(30): X is X is X1X1 or X1X3 or X3X1 or X1X2 or X2X1
  MISC_FEATURE (31)..(31): X is F or P

SEQ ID NO: 828 - protein, 36 aa, Artificial Sequence
  Heteroconjugate construct
DLLKNGERIEKVEGGGTGGKPGIAGFKGEQGPKGEP

SEQ ID NO: 829 - protein, 36 aa, artificial; identical to SEQ ID NO: 164
  Completely synthesized peptide construct
  MISC_FEATURE (1)..(1): X is D and E for acidic amino acids
  MISC_FEATURE (2)..(2): X is I, L or V
  MISC_FEATURE (3)..(3): X is I, L or V
  MISC_FEATURE (4)..(4): X is K, R or H for basic amino acids
  MISC_FEATURE (5)..(5): X is N or Q for amidated amino acids
  MISC_FEATURE (6)..(6): X is A and G
  MISC_FEATURE (7)..(7): X is D and E for acidic amino acids
  MISC_FEATURE (8)..(8): X is K, R or H for basic amino acids
  MISC_FEATURE (9)..(9): X is I, L or V
  MISC_FEATURE (10)..(10): X is D and E for acidic amino acids
  MISC_FEATURE (11)..(11): X is K, R or H for basic amino acids
  MISC_FEATURE (12)..(12): X is I, L or V
  MISC_FEATURE (13)..(13): X is D and E for acidic amino acids
  MISC_FEATURE (14)..(14): X is A and G
  MISC_FEATURE (15)..(15): X is A and G
  MISC_FEATURE (16)..(16): X is A and G
  MISC_FEATURE (17)..(17): X is T or S
  MISC_FEATURE (18)..(18): X is A and G
  MISC_FEATURE (19)..(19): X is A and G
  MISC_FEATURE (20)..(20): X is K, R or H for basic amino acids
  MISC_FEATURE (21)..(21): X is F or P
  MISC_FEATURE (22)..(22): X is A and G
  MISC_FEATURE (23)..(23): X is I, L or V
  MISC_FEATURE (24)..(24): X is A and G
  MISC_FEATURE (25)..(25): X is A and G
  MISC_FEATURE (26)..(26): X is F, W or Y for aromatic amino acids
  MISC_FEATURE (27)..(27): X is K, R or H for basic amino acids
  MISC_FEATURE (28)..(28): X is A and G
  MISC_FEATURE (29)..(29): X is D and E for acidic amino acids
  MISC_FEATURE (30)..(30): X is N or Q for amidated amino acids
  MISC_FEATURE (31)..(31): X is A and G
  MISC_FEATURE (32)..(32): X is F or P
  MISC_FEATURE (33)..(33): X is K, R or H for basic amino acids
  MISC_FEATURE (34)..(34): X is A and G
  MISC_FEATURE (35)..(35): X is D and E for acidic amino acids
  MISC_FEATURE (36)..(36): X is F or P

SEQ ID NO: 830 - protein, 37 aa, artificial; identical to SEQ ID NO: 151
  Completely synthesized peptide construct
  MISC_FEATURE (1)..(1): X is Acetyl or propionyl group, D glycine or D alanine, Cyclohexylalanine at amino terminus
  MISC_FEATURE (2)..(2): X is D and E for acidic amino acids
  MISC_FEATURE (3)..(3): X is I, L or V
  MISC_FEATURE (4)..(4): X is I, L or V
  MISC_FEATURE (5)..(5): X is K, R or H for basic amino acids
  MISC_FEATURE (6)..(6): X is N or Q for amidated amino acids
  MISC_FEATURE (7)..(7): X is A and G
  MISC_FEATURE (8)..(8): X is D and E for acidic amino acids
  MISC_FEATURE (9)..(9): X is K, R or H for basic amino acids
  MISC_FEATURE (10)..(10): X is I, L or V
  MISC_FEATURE (11)..(11): X is D and E for acidic amino acids
  MISC_FEATURE (12)..(12): X is K, R or H for basic amino acids
  MISC_FEATURE (13)..(13): X is I, L or V
  MISC_FEATURE (14)..(14): X is D and E for acidic amino acids
  MISC_FEATURE (15)..(15): X is A and G
  MISC_FEATURE (16)..(16): X is A and G
  MISC_FEATURE (17)..(17): X is A and G
  MISC_FEATURE (18)..(18): X is T or S
  MISC_FEATURE (19)..(19): X is A and G
  MISC_FEATURE (20)..(20): X is A and G
  MISC_FEATURE (21)..(21): X is K, R or H for basic amino acids
  MISC_FEATURE (22)..(22): X is F or P
  MISC_FEATURE (23)..(23): X is A and G
  MISC_FEATURE (24)..(24): X is I, L or V
  MISC_FEATURE (25)..(25): X is A and G
  MISC_FEATURE (26)..(26): X is A and G
  MISC_FEATURE (27)..(27): X is F, W or Y for aromatic amino acids
  MISC_FEATURE (28)..(28): X is K, R or H for basic amino acids
  MISC_FEATURE (29)..(29): X is A and G
  MISC_FEATURE (30)..(30): X is D and E for acidic amino acids
  MISC_FEATURE (31)..(31): X is N or Q for amidated amino acids
  MISC_FEATURE (32)..(32): X is A and G
  MISC_FEATURE (33)..(33): X is F or P
  MISC_FEATURE (34)..(34): X is K, R or H for basic amino acids
  MISC_FEATURE (35)..(35): X is A and G
  MISC_FEATURE (36)..(36): X is D and E for acidic amino acids
  MISC_FEATURE (37)..(37): X is F or P

SEQ ID NO: 831 - protein, 33 aa, artificial; identical to SEQ ID NO: 97
  Completely synthesized peptide construct
  MISC_FEATURE (1)..(1): X is Acetyl or propionyl group, D glycine or D alanine, Cyclohexylalanine at amino terminus
  MISC_FEATURE (2)..(2): X is Gaba for X2X3 or X3X2 or X2X3 or X3X2 or X3X3 or X2X2
  MISC_FEATURE (3)..(3): X is K, R or H for basic amino acids
  MISC_FEATURE (4)..(4): X is N or Q for amidated amino acids
  MISC_FEATURE (5)..(5): X is A and G
  MISC_FEATURE (6)..(6): X is D and E for acidic amino acids
  MISC_FEATURE (7)..(7): X is K, R or H for basic amino acids
  MISC_FEATURE (8)..(8): X is Gaba for X2X3 or X3X2 or X2X3 or X3X2 or X3X3 or X2X2
  MISC_FEATURE (9)..(9): X is K, R or H for basic amino acids
  MISC_FEATURE (10)..(10): X is Gaba for X2X3 or X3X2 or X2X3 or X3X2 or X3X3 or X2X2
  MISC_FEATURE (11)..(11): X is A and G
  MISC_FEATURE (12)..(12): X is A and G
  MISC_FEATURE (13)..(13): X is A and G
  MISC_FEATURE (14)..(14): X is T or S
  MISC_FEATURE (15)..(15): X is A and G
  MISC_FEATURE (16)..(16): X is A and G
  MISC_FEATURE (17)..(17): X is K, R or H for basic amino acids
  MISC_FEATURE (18)..(18): X is F or P
  MISC_FEATURE (19)..(19): X is A and G
  MISC_FEATURE (20)..(20): X is I, L or V
  MISC_FEATURE (21)..(21): X is A and G
  MISC_FEATURE (22)..(22): X is A and G
  MISC_FEATURE (23)..(23): X is F, W or Y for aromatic amino acids
  MISC_FEATURE (24)..(24): X is K, R or H for basic amino acids
  MISC_FEATURE (25)..(25): X is A and G
  MISC_FEATURE (26)..(26): X is D and E for acidic amino acids
  MISC_FEATURE (27)..(27): X is N or Q for amidated amino acids
  MISC_FEATURE (28)..(28): X is A and G
  MISC_FEATURE (29)..(29): X is F or P
  MISC_FEATURE (30)..(30): X is K, R or H for basic amino acids
  MISC_FEATURE (31)..(31): X is A and G
  MISC_FEATURE (32)..(32): X is D and E for acidic amino acids
  MISC_FEATURE (33)..(33): X is F or P

SEQ ID NO: 832 - protein, 33 aa, artificial; identical to SEQ ID NO: 97
  Completely synthesized peptide construct
  MISC_FEATURE (1)..(1): X is Acetyl or propionyl group, D glycine or D alanine, Cyclohexylalanine at amino terminus
  MISC_FEATURE (2)..(2): X is 5-aminopentanoic acid for replacement of 3 or 4 amino acids of X2 and  X3
  MISC_FEATURE (3)..(3): X is K, R or H for basic amino acids
  MISC_FEATURE (4)..(4): X is N or Q for amidated amino acids
  MISC_FEATURE (5)..(5): X is A and G
  MISC_FEATURE (6)..(6): X is D and E for acidic amino acids
  MISC_FEATURE (7)..(7): X is K, R or H for basic amino acids
  MISC_FEATURE (8)..(8): X is Gaba for X2X3 or X3X2 or X2X3 or X3X2 or X3X3 or X2X2
  MISC_FEATURE (9)..(9): X is K, R or H for basic amino acids
  MISC_FEATURE (10)..(10): X is Gaba for X2X3 or X3X2 or X2X3 or X3X2 or X3X3 or X2X2
  MISC_FEATURE (11)..(11): X is A and G
  MISC_FEATURE (12)..(12): X is A and G
  MISC_FEATURE (13)..(13): X is A and G
  MISC_FEATURE (14)..(14): X is T or S
  MISC_FEATURE (15)..(15): X is A and G
  MISC_FEATURE (16)..(16): X is A and G
  MISC_FEATURE (17)..(17): X is K, R or H for basic amino acids
  MISC_FEATURE (18)..(18): X is F or P
  MISC_FEATURE (19)..(19): X is A and G
  MISC_FEATURE (20)..(20): X is I, L or V
  MISC_FEATURE (21)..(21): X is A and G
  MISC_FEATURE (22)..(22): X is A and G
  MISC_FEATURE (23)..(23): X is F, W or Y for aromatic amino acids
  MISC_FEATURE (24)..(24): X is K, R or H for basic amino acids
  MISC_FEATURE (25)..(25): X is A and G
  MISC_FEATURE (26)..(26): X is D and E for acidic amino acids
  MISC_FEATURE (27)..(27): X is N or Q for amidated amino acids
  MISC_FEATURE (28)..(28): X is A and G
  MISC_FEATURE (29)..(29): X is F or P
  MISC_FEATURE (30)..(30): X is K, R or H for basic amino acids
  MISC_FEATURE (31)..(31): X is A and G
  MISC_FEATURE (32)..(32): X is D and E for acidic amino acids
  MISC_FEATURE (33)..(33): X is F or P

SEQ ID NO: 833 - protein, 31 aa, artificial; identical to SEQ ID NO: 123
  Completely synthesized peptide construct
  MISC_FEATURE (1)..(1): X is D and E for acidic amino acids
  MISC_FEATURE (2)..(2): X is I, L or V
  MISC_FEATURE (3)..(3): X is I, L or V
  MISC_FEATURE (4)..(4): X is K, R or H for basic amino acids
  MISC_FEATURE (5)..(5): X is N or Q for amidated amino acids
  MISC_FEATURE (6)..(6): X is A and G
  MISC_FEATURE (7)..(7): X is D and E for acidic amino acids
  MISC_FEATURE (8)..(8): X is K, R or H for basic amino acids
  MISC_FEATURE (9)..(9): X is I, L or V
  MISC_FEATURE (10)..(10): X is D and E for acidic amino acids
  MISC_FEATURE (11)..(11): X is K, R or H for basic amino acids
  MISC_FEATURE (12)..(12): X is I, L or V
  MISC_FEATURE (13)..(13): X is D and E for acidic amino acids
  MISC_FEATURE (14)..(14): X is A and G
  MISC_FEATURE (15)..(15): X is A and G
  MISC_FEATURE (16)..(16): X is A and G
  MISC_FEATURE (17)..(17): X is T or S
  MISC_FEATURE (18)..(18): X is X1X1 or X1X3 or X3X1 or X1X2 or X2X1
  MISC_FEATURE (19)..(19): X is K, R or H for basic amino acids
  MISC_FEATURE (20)..(20): X is F or P
  MISC_FEATURE (21)..(21): X is Gaba for X2X3 or X3X2 or X2X3 or X3X2 or X3X3 or X2X2
  MISC_FEATURE (22)..(22): X is X1X1 or X1X3 or X3X1 or X1X2 or X2X1
  MISC_FEATURE (23)..(23): X is F, W or Y for aromatic amino acids
  MISC_FEATURE (24)..(24): X is K, R or H for basic amino acids
  MISC_FEATURE (25)..(25): X is X1X1 or X1X3 or X3X1 or X1X2 or X2X1
  MISC_FEATURE (26)..(26): X is N or Q for amidated amino acids
  MISC_FEATURE (27)..(27): X is A and G
  MISC_FEATURE (28)..(28): X is F or P
  MISC_FEATURE (29)..(29): X is K, R or H for basic amino acids
  MISC_FEATURE (30)..(30): X is X1X1 or X1X3 or X3X1 or X1X2 or X2X1
  MISC_FEATURE (31)..(31): X is F or P

SEQ ID NO: 834 - protein, 32 aa, artificial; identical to SEQ ID NO: 153
  Completely synthesized peptide construct
  MISC_FEATURE (1)..(1): X is Acetyl or propionyl group, D glycine or D alanine, Cyclohexylalanine at amino terminus
  MISC_FEATURE (2)..(2): X is D and E for acidic amino acids
  MISC_FEATURE (3)..(3): X is I, L or V
  MISC_FEATURE (4)..(4): X is I, L or V
  MISC_FEATURE (5)..(5): X is K, R or H for basic amino acids
  MISC_FEATURE (6)..(6): X is N or Q for amidated amino acids
  MISC_FEATURE (7)..(7): X is A and G
  MISC_FEATURE (8)..(8): X is D and E for acidic amino acids
  MISC_FEATURE (9)..(9): X is K, R or H for basic amino acids
  MISC_FEATURE (10)..(10): X is I, L or V
  MISC_FEATURE (11)..(11): X is D and E for acidic amino acids
  MISC_FEATURE (12)..(12): X is K, R or H for basic amino acids
  MISC_FEATURE (13)..(13): X is I, L or V
  MISC_FEATURE (14)..(14): X is D and E for acidic amino acids
  MISC_FEATURE (15)..(15): X is A and G
  MISC_FEATURE (16)..(16): X is A and G
  MISC_FEATURE (17)..(17): X is A and G
  MISC_FEATURE (18)..(18): X is T or S
  MISC_FEATURE (19)..(19): X is X1X1 or X1X3 or X3X1 or X1X2 or X2X1
  MISC_FEATURE (20)..(20): X is K, R or H for basic amino acids
  MISC_FEATURE (21)..(21): X is F or P
  MISC_FEATURE (22)..(22): X is Gaba for X2X3 or X3X2 or X2X3 or X3X2 or X3X3 or X2X2
  MISC_FEATURE (23)..(23): X is X1X1 or X1X3 or X3X1 or X1X2 or X2X1
  MISC_FEATURE (24)..(24): X is F, W or Y for aromatic amino acids
  MISC_FEATURE (25)..(25): X is K, R or H for basic amino acids
  MISC_FEATURE (26)..(26): X is X1X1 or X1X3 or X3X1 or X1X2 or X2X1
  MISC_FEATURE (27)..(27): X is N or Q for amidated amino acids
  MISC_FEATURE (28)..(28): X is A and G
  MISC_FEATURE (29)..(29): X is F or P
  MISC_FEATURE (30)..(30): X is K, R or H for basic amino acids
  MISC_FEATURE (31)..(31): X is X1X1 or X1X3 or X3X1 or X1X2 or X2X1
  MISC_FEATURE (32)..(32): X is F or P

SEQ ID NO: 835 - protein, 27 aa, artificial
  Completely synthesized peptide construct
  MISC_FEATURE (1)..(1): X is Acetyl or propionyl group, D glycine or D alanine, Cyclohexylalanine at amino terminus
  MISC_FEATURE (2)..(2): X is Gaba for X2X3 or X3X2 or X2X3 or X3X2 or X3X3 or X2X2
  MISC_FEATURE (3)..(3): X is K, R or H for basic amino acids
  MISC_FEATURE (4)..(4): X is N or Q for amidated amino acids
  MISC_FEATURE (5)..(5): X is A and G
  MISC_FEATURE (6)..(6): X is D and E for acidic amino acids
  MISC_FEATURE (7)..(7): X is K, R or H for basic amino acids
  MISC_FEATURE (8)..(8): X is Gaba for X2X3 or X3X2 or X2X3 or X3X2 or X3X3 or X2X2
  MISC_FEATURE (9)..(9): X is K, R or H for basic amino acids
  MISC_FEATURE (10)..(10): X is Gaba for X2X3 or X3X2 or X2X3 or X3X2 or X3X3 or X2X2
  MISC_FEATURE (11)..(11): X is A and G
  MISC_FEATURE (12)..(12): X is A and G
  MISC_FEATURE (13)..(13): X is A and G
  MISC_FEATURE (14)..(14): X is T or S
  MISC_FEATURE (15)..(15): X is X1X1 or X1X3 or X3X1 or X1X2 or X2X1
  MISC_FEATURE (16)..(16): X is K, R or H for basic amino acids
  MISC_FEATURE (17)..(17): X is F or P
  MISC_FEATURE (18)..(18): X is Gaba for X2X3 or X3X2 or X2X3 or X3X2 or X3X3 or X2X2
  MISC_FEATURE (19)..(19): X is X1X1 or X1X3 or X3X1 or X1X2 or X2X1
  MISC_FEATURE (20)..(20): X is F, W or Y for aromatic amino acids
  MISC_FEATURE (21)..(21): X is K, R or H for basic amino acids
  MISC_FEATURE (22)..(22): X is X1X1 or X1X3 or X3X1 or X1X2 or X2X1
  MISC_FEATURE (23)..(23): X is N or Q for amidated amino acids
  MISC_FEATURE (24)..(24): X is A and G
  MISC_FEATURE (25)..(25): X is F or P
  MISC_FEATURE (26)..(26): X is K, R or H for basic amino acids
  MISC_FEATURE (27)..(27): X is X1X1 or X1X3 or X3X1 or X1X2 or X2X1
  MISC_FEATURE (28)..(28): X is F or P
XXXXXXXXXXXXXXXXXXXXXXXXXXX

SEQ ID NO: 836 - protein, 28 aa, artificial
  Completely synthesized peptide construct
  MISC_FEATURE (1)..(1): X is Acetyl or propionyl group, D glycine or D alanine, Cyclohexylalanine at amino terminus
  MISC_FEATURE (2)..(2): X is 5-aminopentanoic acid for replacement of 3 or 4 amino acids of X2 and  X3
  MISC_FEATURE (3)..(3): X is K, R or H for basic amino acids
  MISC_FEATURE (4)..(4): X is N or Q for amidated amino acids
  MISC_FEATURE (5)..(5): X is A and G
  MISC_FEATURE (6)..(6): X is D and E for acidic amino acids
  MISC_FEATURE (7)..(7): X is K, R or H for basic amino acids
  MISC_FEATURE (8)..(8): X is Gaba for X2X3 or X3X2 or X2X3 or X3X2 or X3X3 or X2X2
  MISC_FEATURE (9)..(9): X is K, R or H for basic amino acids
  MISC_FEATURE (10)..(10): X is Gaba for X2X3 or X3X2 or X2X3 or X3X2 or X3X3 or X2X2
  MISC_FEATURE (11)..(11): X is A and G
  MISC_FEATURE (12)..(12): X is A and G
  MISC_FEATURE (13)..(13): X is A and G
  MISC_FEATURE (14)..(14): X is T or S
  MISC_FEATURE (15)..(15): X is X1X1 or X1X3 or X3X1 or X1X2 or X2X1
  MISC_FEATURE (16)..(16): X is K, R or H for basic amino acids
  MISC_FEATURE (17)..(17): X is F or P
  MISC_FEATURE (18)..(18): X is Gaba for X2X3 or X3X2 or X2X3 or X3X2 or X3X3 or X2X2
  MISC_FEATURE (19)..(19): X is X1X1 or X1X3 or X3X1 or X1X2 or X2X1
  MISC_FEATURE (20)..(20): X is F, W or Y for aromatic amino acids
  MISC_FEATURE (21)..(21): X is K, R or H for basic amino acids
  MISC_FEATURE (22)..(22): X is X1X1 or X1X3 or X3X1 or X1X2 or X2X1
  MISC_FEATURE (23)..(23): X is N or Q for amidated amino acids
  MISC_FEATURE (24)..(24): X is A and G
  MISC_FEATURE (25)..(25): X is F or P
  MISC_FEATURE (26)..(26): X is K, R or H for basic amino acids
  MISC_FEATURE (27)..(27): X is X1X1 or X1X3 or X3X1 or X1X2 or X2X1
  MISC_FEATURE (28)..(28): X is F or P
XXXXXXXXXXXXXXXXXXXXXXXXXXXX

SEQ ID NO: 837 - protein, 38 aa, artificial
  Completely synthesized peptide construct
TGGKPGIAGFKGEQGPKGEPGGGDGQEEKAGVVSTGLI

SEQ ID NO: 838 - protein, 38 aa, artificial; identical to SEQ ID NO: 162
  Completely synthesized peptide construct
  MISC_FEATURE (1)..(1): X is T or S
  MISC_FEATURE (2)..(2): X is A and G
  MISC_FEATURE (3)..(3): X is A and G
  MISC_FEATURE (4)..(4): X is K, R or H for basic amino acids
  MISC_FEATURE (5)..(5): X is F or P
  MISC_FEATURE (6)..(6): X is A and G
  MISC_FEATURE (7)..(7): X is I, L or V
  MISC_FEATURE (8)..(8): X is A and G
  MISC_FEATURE (9)..(9): X is A and G
  MISC_FEATURE (10)..(10): X is F, W or Y for aromatic amino acids
  MISC_FEATURE (11)..(11): X is K, R or H for basic amino acids
  MISC_FEATURE (12)..(12): X is A and G
  MISC_FEATURE (13)..(13): X is D and E for acidic amino acids
  MISC_FEATURE (14)..(14): X is N or Q for amidated amino acids
  MISC_FEATURE (15)..(15): X is A and G
  MISC_FEATURE (16)..(16): X is F or P
  MISC_FEATURE (17)..(17): X is K, R or H for basic amino acids
  MISC_FEATURE (18)..(18): X is A and G
  MISC_FEATURE (19)..(19): X is D and E for acidic amino acids
  MISC_FEATURE (20)..(20): X is F or P
  MISC_FEATURE (21)..(21): X is A and G
  MISC_FEATURE (22)..(22): X is A and G
  MISC_FEATURE (23)..(23): X is A and G
  MISC_FEATURE (24)..(24): X is D and E for acidic amino acids
  MISC_FEATURE (25)..(25): X is A and G
  MISC_FEATURE (26)..(26): X is N or Q for amidated amino acids
  MISC_FEATURE (27)..(27): X is D and E for acidic amino acids
  MISC_FEATURE (28)..(28): X is D and E for acidic amino acids
  MISC_FEATURE (29)..(29): X is K, R or H for basic amino acids
  MISC_FEATURE (30)..(30): X is A and G
  MISC_FEATURE (31)..(31): X is A and G
  MISC_FEATURE (32)..(32): X is I, L or V
  MISC_FEATURE (33)..(33): X is I, L or V
  MISC_FEATURE (34)..(34): X is C or S
  MISC_FEATURE (35)..(35): X is T or S
  MISC_FEATURE (36)..(36): X is A and G
  MISC_FEATURE (37)..(37): X is I, L or V
  MISC_FEATURE (38)..(38): X is I, L or V

SEQ ID NO: 839 - protein, 39 aa, artificial; identical to SEQ ID NO: 176
  Completely synthesized peptide construct
  MISC_FEATURE (1)..(1): X is T or S
  MISC_FEATURE (2)..(2): X is A and G
  MISC_FEATURE (3)..(3): X is A and G
  MISC_FEATURE (4)..(4): X is K, R or H for basic amino acids
  MISC_FEATURE (5)..(5): X is F or P
  MISC_FEATURE (6)..(6): X is A and G
  MISC_FEATURE (7)..(7): X is I, L or V
  MISC_FEATURE (8)..(8): X is A and G
  MISC_FEATURE (9)..(9): X is A and G
  MISC_FEATURE (10)..(10): X is F, W or Y for aromatic amino acids
  MISC_FEATURE (11)..(11): X is K, R or H for basic amino acids
  MISC_FEATURE (12)..(12): X is A and G
  MISC_FEATURE (13)..(13): X is D and E for acidic amino acids
  MISC_FEATURE (14)..(14): X is N or Q for amidated amino acids
  MISC_FEATURE (15)..(15): X is A and G
  MISC_FEATURE (16)..(16): X is F or P
  MISC_FEATURE (17)..(17): X is K, R or H for basic amino acids
  MISC_FEATURE (18)..(18): X is A and G
  MISC_FEATURE (19)..(19): X is D and E for acidic amino acids
  MISC_FEATURE (20)..(20): X is F or P
  misc_feature (21)..(21): Xaa can be any naturally occurring amino acid
  MISC_FEATURE (22)..(22): X is A and G
  MISC_FEATURE (23)..(23): X is A and G
  MISC_FEATURE (24)..(24): X is Acetyl or propionyl group, D glycine or D alanine, Cyclohexylalanine at amino terminus
  MISC_FEATURE (25)..(25): X is D and E for acidic amino acids
  MISC_FEATURE (26)..(26): X is A and G
  MISC_FEATURE (27)..(27): X is N or Q for amidated amino acids
  MISC_FEATURE (28)..(28): X is D and E for acidic amino acids
  MISC_FEATURE (29)..(29): X is D and E for acidic amino acids
  MISC_FEATURE (30)..(30): X is K, R or H for basic amino acids
  MISC_FEATURE (31)..(31): X is A and G
  MISC_FEATURE (32)..(32): X is A and G
  MISC_FEATURE (33)..(33): X is I, L or V
  MISC_FEATURE (34)..(34): X is I, L or V
  MISC_FEATURE (35)..(35): X is C or S
  MISC_FEATURE (36)..(36): X is T or S
  MISC_FEATURE (37)..(37): X is A and G
  MISC_FEATURE (38)..(38): X is I, L or V
  MISC_FEATURE (39)..(39): X is I, L or V

SEQ ID NO: 840 - protein, 39 aa, artificial; identical to SEQ ID NO: 176
  Completely synthesized peptide construct
  MISC_FEATURE (1)..(1): X is T or S
  MISC_FEATURE (2)..(2): X is A and G
  MISC_FEATURE (3)..(3): X is A and G
  MISC_FEATURE (4)..(4): X is K, R or H for basic amino acids
  MISC_FEATURE (5)..(5): X is F or P
  MISC_FEATURE (6)..(6): X is A and G
  MISC_FEATURE (7)..(7): X is I, L or V
  MISC_FEATURE (8)..(8): X is A and G
  MISC_FEATURE (9)..(9): X is A and G
  MISC_FEATURE (10)..(10): X is F, W or Y for aromatic amino acids
  MISC_FEATURE (11)..(11): X is K, R or H for basic amino acids
  MISC_FEATURE (12)..(12): X is A and G
  MISC_FEATURE (13)..(13): X is D and E for acidic amino acids
  MISC_FEATURE (14)..(14): X is N or Q for amidated amino acids
  MISC_FEATURE (15)..(15): X is A and G
  MISC_FEATURE (16)..(16): X is F or P
  MISC_FEATURE (17)..(17): X is K, R or H for basic amino acids
  MISC_FEATURE (18)..(18): X is A and G
  MISC_FEATURE (19)..(19): X is D and E for acidic amino acids
  MISC_FEATURE (20)..(20): X is F or P
  MISC_FEATURE (21)..(21): X is A and G
  MISC_FEATURE (22)..(22): X is A and G
  MISC_FEATURE (23)..(23): X is A and G
  MISC_FEATURE (24)..(24): X is 5-aminopentanoic acid for replacement of 3 or 4 amino acids of X2 and  X3
  MISC_FEATURE (25)..(25): X is D and E for acidic amino acids
  MISC_FEATURE (26)..(26): X is A and G
  MISC_FEATURE (27)..(27): X is N or Q for amidated amino acids
  MISC_FEATURE (28)..(28): X is D and E for acidic amino acids
  MISC_FEATURE (29)..(29): X is D and E for acidic amino acids
  MISC_FEATURE (30)..(30): X is K, R or H for basic amino acids
  MISC_FEATURE (31)..(31): X is A and G
  MISC_FEATURE (32)..(32): X is A and G
  MISC_FEATURE (33)..(33): X is I, L or V
  MISC_FEATURE (34)..(34): X is I, L or V
  MISC_FEATURE (35)..(35): X is C or S
  MISC_FEATURE (36)..(36): X is T or S
  MISC_FEATURE (37)..(37): X is A and G
  misc_feature (38)..(38): Xaa can be any naturally occurring amino acid
  MISC_FEATURE (39)..(39): X is I, L or V

SEQ ID NO: 841 - protein, 36 aa, artificial; identical to SEQ ID NO: 164
  Completely synthesized peptide construct
  MISC_FEATURE (1)..(1): X is T or S
  MISC_FEATURE (2)..(2): X is A and G
  MISC_FEATURE (3)..(3): X is A and G
  MISC_FEATURE (4)..(4): X is K, R or H for basic amino acids
  MISC_FEATURE (5)..(5): X is F or P
  MISC_FEATURE (6)..(6): X is A and G
  MISC_FEATURE (7)..(7): X is I, L or V
  MISC_FEATURE (8)..(8): X is A and G
  MISC_FEATURE (9)..(9): X is A and G
  MISC_FEATURE (10)..(10): X is F, W or Y for aromatic amino acids
  MISC_FEATURE (11)..(11): X is K, R or H for basic amino acids
  MISC_FEATURE (12)..(12): X is A and G
  MISC_FEATURE (13)..(13): X is D and E for acidic amino acids
  MISC_FEATURE (14)..(14): X is N or Q for amidated amino acids
  MISC_FEATURE (15)..(15): X is A and G
  MISC_FEATURE (16)..(16): X is F or P
  MISC_FEATURE (17)..(17): X is K, R or H for basic amino acids
  MISC_FEATURE (18)..(18): X is A and G
  MISC_FEATURE (19)..(19): X is D and E for acidic amino acids
  MISC_FEATURE (20)..(20): X is F or P
  MISC_FEATURE (21)..(21): X is A and G
  MISC_FEATURE (22)..(22): X is A and G
  MISC_FEATURE (23)..(23): X is A and G
  MISC_FEATURE (24)..(24): X is Acetyl or propionyl group, D glycine or D alanine, Cyclohexylalanine at amino terminus
  MISC_FEATURE (25)..(25): X is D and E for acidic amino acids
  MISC_FEATURE (26)..(26): X is A and G
  MISC_FEATURE (27)..(27): X is N or Q for amidated amino acids
  MISC_FEATURE (28)..(28): X is Gaba for X2X3 or X3X2 or X2X3 or X3X2 or X3X3 or X2X2
  MISC_FEATURE (29)..(29): X is K, R or H for basic amino acids
  MISC_FEATURE (30)..(30): X is A and G
  MISC_FEATURE (31)..(31): X is A and G
  MISC_FEATURE (32)..(32): X is Gaba for X2X3 or X3X2 or X2X3 or X3X2 or X3X3 or X2X2
  MISC_FEATURE (33)..(33): X is C or S
  MISC_FEATURE (34)..(34): X is Tor S
  MISC_FEATURE (35)..(35): X is A and G
  MISC_FEATURE (36)..(36): X is Gaba for X2X3 or X3X2 or X2X3 or X3X2 or X3X3 or X2X2

SEQ ID NO: 842 - protein, 33 aa, artificial; identical to SEQ ID NO: 97
  Completely synthesized peptide construct
  MISC_FEATURE (1)..(1): X is T or S
  MISC_FEATURE (2)..(2): X is X1X1 or X1X3 or X3X1 or X1X2 or X2X1
  MISC_FEATURE (3)..(3): X is K, R or H for basic amino acids
  MISC_FEATURE (4)..(4): X is F or P
  MISC_FEATURE (5)..(5): X is Gaba for X2X3 or X3X2 or X2X3 or X3X2 or X3X3 or X2X2
  MISC_FEATURE (6)..(6): X is X1X1 or X1X3 or X3X1 or X1X2 or X2X1
  MISC_FEATURE (7)..(7): X is F, W or Y for aromatic amino acids
  MISC_FEATURE (8)..(8): X is K, R or H for basic amino acids
  MISC_FEATURE (9)..(9): X is X1X1 or X1X3 or X3X1 or X1X2 or X2X1
  MISC_FEATURE (10)..(10): X is N or Q for amidated amino acids
  MISC_FEATURE (11)..(11): X is A and G
  MISC_FEATURE (12)..(12): X is F or P
  MISC_FEATURE (13)..(13): X is K, R or H for basic amino acids
  MISC_FEATURE (14)..(14): X is X1X1 or X1X3 or X3X1 or X1X2 or X2X1
  MISC_FEATURE (15)..(15): X is F or P
  MISC_FEATURE (16)..(16): X is A and G
  MISC_FEATURE (17)..(17): X is A and G
  MISC_FEATURE (18)..(18): X is A and G
  MISC_FEATURE (19)..(19): X is D and E for acidic amino acids
  MISC_FEATURE (20)..(20): X is A and g
  MISC_FEATURE (21)..(21): X is N or Q for amidated amino acids
  MISC_FEATURE (22)..(22): X is D and E for acidic amino acids
  MISC_FEATURE (23)..(23): X is D and E for acidic amino acids
  MISC_FEATURE (24)..(24): X is K, R or H for basic amino acids
  MISC_FEATURE (25)..(25): X is A and G
  MISC_FEATURE (26)..(26): X is A and G
  MISC_FEATURE (27)..(27): X is I, L or V
  MISC_FEATURE (28)..(28): X is I, L or V
  MISC_FEATURE (29)..(29): X is C or S
  MISC_FEATURE (30)..(30): X is T or S
  MISC_FEATURE (31)..(31): X is A and G
  MISC_FEATURE (32)..(32): X is I, L or V
  MISC_FEATURE (33)..(33): X is I, L or V

SEQ ID NO: 843 - protein, 34 aa, artificial; identical to SEQ ID NO: 77
  Completely synthesized peptide construct
  MISC_FEATURE (1)..(1): X is T or S
  MISC_FEATURE (2)..(2): X is X1X1 or X1X3 or X3X1 or X1X2 or X2X1
  MISC_FEATURE (3)..(3): X is K, R or H for basic amino acids
  MISC_FEATURE (4)..(4): X is F or P
  MISC_FEATURE (5)..(5): X is Gaba for X2X3 or X3X2 or X2X3 or X3X2 or X3X3 or X2X2
  MISC_FEATURE (6)..(6): X is X1X1 or X1X3 or X3X1 or X1X2 or X2X1
  MISC_FEATURE (7)..(7): X is F, W or Y for aromatic amino acids
  MISC_FEATURE (8)..(8): X is K, R or H for basic amino acids
  MISC_FEATURE (9)..(9): X is X1X1 or X1X3 or X3X1 or X1X2 or X2X1
  MISC_FEATURE (10)..(10): X is N or Q for amidated amino acids
  MISC_FEATURE (11)..(11): X is A and G
  MISC_FEATURE (12)..(12): X is F or P
  MISC_FEATURE (13)..(13): X is K, R or H for basic amino acids
  MISC_FEATURE (14)..(14): X is X1X1 or X1X3 or X3X1 or X1X2 or X2X1
  MISC_FEATURE (15)..(15): X is F or P
  MISC_FEATURE (16)..(16): X is A and G
  MISC_FEATURE (17)..(17): X is A and G
  MISC_FEATURE (18)..(18): X is A and G
  MISC_FEATURE (19)..(19): X is Acetyl or propionyl group, D glycine or D alanine, Cyclohexylalanine at amino terminus
  MISC_FEATURE (20)..(20): X is D and E for acidic amino acids
  MISC_FEATURE (21)..(21): X is A and G
  MISC_FEATURE (22)..(22): X is N or Q for amidated amino acids
  MISC_FEATURE (23)..(23): X is D and E for acidic amino acids
  MISC_FEATURE (24)..(24): X is D and E for acidic amino acids
  MISC_FEATURE (25)..(25): X is K, R or H for basic amino acids
  MISC_FEATURE (26)..(26): X is A and G
  MISC_FEATURE (27)..(27): X is A and G
  MISC_FEATURE (28)..(28): X is I, L or V
  MISC_FEATURE (29)..(29): X is I, L or V
  MISC_FEATURE (30)..(30): X is C or S
  MISC_FEATURE (31)..(31): X is T or S
  MISC_FEATURE (32)..(32): X is A and G
  MISC_FEATURE (33)..(33): X is I, L or V
  MISC_FEATURE (34)..(34): X is I, L or V

SEQ ID NO: 844 - protein, 33 aa, artificial; identical to SEQ ID NO: 97
  Completely synthesized peptide construct
  MISC_FEATURE (1)..(1): X is T or S
  MISC_FEATURE (2)..(2): X is X1X1 or X1X3 or X3X1 or X1X2 or X2X1
  MISC_FEATURE (3)..(3): X is K, R or H for basic amino acids
  MISC_FEATURE (4)..(4): X is F or P
  MISC_FEATURE (5)..(5): X is Gaba for X2X3 or X3X2 or X2X3 or X3X2 or X3X3 or X2X2
  MISC_FEATURE (6)..(6): X is X1X1 or X1X3 or X3X1 or X1X2 or X2X1
  MISC_FEATURE (7)..(7): X is F, W or Y for aromatic amino acids
  MISC_FEATURE (8)..(8): X is K, R or H for basic amino acids
  MISC_FEATURE (9)..(9): X is X1X1 or X1X3 or X3X1 or X1X2 or X2X1
  MISC_FEATURE (10)..(10): X is N or Q for amidated amino acids
  MISC_FEATURE (11)..(11): X is A and G
  MISC_FEATURE (12)..(12): X is F or P
  MISC_FEATURE (13)..(13): X is K, R or H for basic amino acids
  MISC_FEATURE (14)..(14): X is X1X1 or X1X3 or X3X1 or X1X2 or X2X1
  MISC_FEATURE (15)..(15): X is F or P
  MISC_FEATURE (16)..(16): X is A and G
  MISC_FEATURE (17)..(17): X is A and G
  MISC_FEATURE (18)..(18): X is A and G
  MISC_FEATURE (19)..(19): X is 5-aminopentanoic acid for replacement of 3 or 4 amino acids of X2 and  X3
  MISC_FEATURE (20)..(20): X is D and E for acidic amino acids
  MISC_FEATURE (21)..(21): X is A and G
  MISC_FEATURE (22)..(22): X is N or Q for amidated amino acids
  MISC_FEATURE (23)..(23): X is D and E for acidic amino acids
  MISC_FEATURE (24)..(24): X is D and E for acidic amino acids
  MISC_FEATURE (25)..(25): X is K, R or H for basic amino acids
  MISC_FEATURE (26)..(26): X is A and G
  MISC_FEATURE (27)..(27): X is A and G
  MISC_FEATURE (28)..(28): X is I, L or V
  MISC_FEATURE (29)..(29): X is I, L or V
  MISC_FEATURE (30)..(30): X is C or S
  MISC_FEATURE (31)..(31): X is T or S
  MISC_FEATURE (32)..(32): X is A and G
  MISC_FEATURE (33)..(33): X is I, L or V
  MISC_FEATURE (34)..(34): X is I, L or V

SEQ ID NO: 845 - protein, 31 aa, artificial; identical to SEQ ID NO: 123
  Completely synthesized peptide construct
  MISC_FEATURE (1)..(1): X is T or S
  MISC_FEATURE (2)..(2): X is X1X1 or X1X3 or X3X1 or X1X2 or X2X1
  MISC_FEATURE (3)..(3): X is K, R or H for basic amino acids
  MISC_FEATURE (4)..(4): X is F or P
  MISC_FEATURE (5)..(5): X is Gaba for X2X3 or X3X2 or X2X3 or X3X2 or X3X3 or X2X2
  MISC_FEATURE (6)..(6): X is X1X1 or X1X3 or X3X1 or X1X2 or X2X1
  MISC_FEATURE (7)..(7): X is F, W or Y for aromatic amino acids
  MISC_FEATURE (8)..(8): X is K, R or H for basic amino acids
  MISC_FEATURE (9)..(9): X is X1X1 or X1X3 or X3X1 or X1X2 or X2X1
  MISC_FEATURE (10)..(10): X is N or Q for amidated amino acids
  MISC_FEATURE (11)..(11): X is A and G
  MISC_FEATURE (12)..(12): X is F or P
  MISC_FEATURE (13)..(13): X is K, R or H for basic amino acids
  MISC_FEATURE (14)..(14): X is X1X1 or X1X3 or X3X1 or X1X2 or X2X1
  MISC_FEATURE (15)..(15): X is F or P
  MISC_FEATURE (16)..(16): X is Acetyl or propionyl group, D glycine or D alanine, Cyclohexylalanine at amino terminus
  MISC_FEATURE (17)..(17): X is A and G
  MISC_FEATURE (18)..(18): X is A and G
  MISC_FEATURE (19)..(19): X is A and G
  MISC_FEATURE (20)..(20): X is D and E for acidic amino acids
  MISC_FEATURE (21)..(21): X is A and G
  MISC_FEATURE (22)..(22): X is N or Q for amidated amino acids
  MISC_FEATURE (23)..(23): X is Gaba for X2X3 or X3X2 or X2X3 or X3X2 or X3X3 or X2X2
  MISC_FEATURE (24)..(24): X is K, R or H for basic amino acids
  MISC_FEATURE (25)..(25): X is A and G
  MISC_FEATURE (26)..(26): X is A and G
  MISC_FEATURE (27)..(27): X is Gaba for X2X3 or X3X2 or X2X3 or X3X2 or X3X3 or X2X2
  MISC_FEATURE (28)..(28): X is C or S
  MISC_FEATURE (29)..(29): X is T or S
  MISC_FEATURE (30)..(30): X is A and G
  MISC_FEATURE (31)..(31): X is Gaba for X2X3 or X3X2 or X2X3 or X3X2 or X3X3 or X2X2

SEQ ID NO: 846 - protein, 36 aa, artificial
  Completely synthesized peptide construct
TGGKPGIAGFKGEQGPKGEPGGGDLLKNGERIEKVE

SEQ ID NO: 847 - protein, 36 aa, artificial; identical to SEQ ID NO: 164
  Completely synthesized peptide construct
  MISC_FEATURE (1)..(1): X is T or S
  MISC_FEATURE (2)..(2): X is A and G
  MISC_FEATURE (3)..(3): X is A and G
  MISC_FEATURE (4)..(4): X is K, R or H for basic amino acids
  MISC_FEATURE (5)..(5): X is F or P
  MISC_FEATURE (6)..(6): X is A and G
  MISC_FEATURE (7)..(7): X is I, L or V
  MISC_FEATURE (8)..(8): X is A and G
  MISC_FEATURE (9)..(9): X is A and G
  MISC_FEATURE (10)..(10): X is F, W or Y for aromatic amino acids
  MISC_FEATURE (11)..(11): X is K, R or H for basic amino acids
  MISC_FEATURE (12)..(12): X is A and G
  MISC_FEATURE (13)..(13): X is D and E for acidic amino acids
  MISC_FEATURE (14)..(14): X is N or Q for amidated amino acids
  MISC_FEATURE (15)..(15): X is A and G
  MISC_FEATURE (16)..(16): X is F or P
  MISC_FEATURE (17)..(17): X is K, R or H for basic amino acids
  MISC_FEATURE (18)..(18): X is A and G
  MISC_FEATURE (19)..(19): X is D and E for acidic amino acids
  MISC_FEATURE (20)..(20): X is F or P
  MISC_FEATURE (21)..(21): X is A and G
  MISC_FEATURE (22)..(22): X is A and G
  MISC_FEATURE (23)..(23): X is A and G
  MISC_FEATURE (24)..(24): X is D and E for acidic amino acids
  MISC_FEATURE (25)..(25): X is I, L or V
  MISC_FEATURE (26)..(26): X is I, L or V
  MISC_FEATURE (27)..(27): X is K, R or H for basic amino acids
  MISC_FEATURE (28)..(28): X is N or Q for amidated amino acids
  MISC_FEATURE (29)..(29): X is A and G
  MISC_FEATURE (30)..(30): X is D and E for acidic amino acids
  MISC_FEATURE (31)..(31): X is K, R or H for basic amino acids
  MISC_FEATURE (32)..(32): X is I, L or V
  MISC_FEATURE (33)..(33): X is D and E for acidic amino acids
  MISC_FEATURE (34)..(34): X is K, R or H for basic amino acids
  MISC_FEATURE (35)..(35): X is I, L or V
  MISC_FEATURE (36)..(36): X is D and E for acidic amino acids

SEQ ID NO: 848 - protein, 37 aa, artificial; identical to SEQ ID NO: 151
  Completely synthesized peptide construct
  MISC_FEATURE (1)..(1): X is T or S
  MISC_FEATURE (2)..(2): X is A and G
  MISC_FEATURE (3)..(3): X is A and G
  MISC_FEATURE (4)..(4): X is K, R or H for basic amino acids
  MISC_FEATURE (5)..(5): X is F or P
  MISC_FEATURE (6)..(6): X is A and G
  MISC_FEATURE (7)..(7): X is I, L or V
  MISC_FEATURE (8)..(8): X is A and G
  MISC_FEATURE (9)..(9): X is A and G
  MISC_FEATURE (10)..(10): X is F, W or Y for aromatic amino acids
  MISC_FEATURE (11)..(11): X is K, R or H for basic amino acids
  MISC_FEATURE (12)..(12): X is A and G
  MISC_FEATURE (13)..(13): X is D and E for acidic amino acids
  MISC_FEATURE (14)..(14): X is N or Q for amidated amino acids
  MISC_FEATURE (15)..(15): X is A and G
  MISC_FEATURE (16)..(16): X is F or P
  MISC_FEATURE (17)..(17): X is K, R or H for basic amino acids
  MISC_FEATURE (18)..(18): X is A and G
  MISC_FEATURE (19)..(19): X is D and E for acidic amino acids
  MISC_FEATURE (20)..(20): X is F or P
  MISC_FEATURE (21)..(21): X is A and G
  MISC_FEATURE (22)..(22): X is A and G
  MISC_FEATURE (23)..(23): X is A and G
  MISC_FEATURE (24)..(24): X is Acetyl or propionyl group, D glycine or D alanine, Cyclohexylalanine at amino terminus
  MISC_FEATURE (25)..(25): X is D and E for acidic amino acids
  MISC_FEATURE (26)..(26): X is I, L or V
  MISC_FEATURE (27)..(27): X is I, L or V
  MISC_FEATURE (28)..(28): X is K, R or H for basic amino acids
  MISC_FEATURE (29)..(29): X is N or Q for amidated amino acids
  MISC_FEATURE (30)..(30): X is A and G
  MISC_FEATURE (31)..(31): X is D and E for acidic amino acids
  MISC_FEATURE (32)..(32): X is K, R or H for basic amino acids
  MISC_FEATURE (33)..(33): X is I, L or V
  MISC_FEATURE (34)..(34): X is D and E for acidic amino acids
  MISC_FEATURE (35)..(35): X is K, R or H for basic amino acids
  MISC_FEATURE (36)..(36): X is I, L or V
  MISC_FEATURE (37)..(37): X is D and E for acidic amino acids

SEQ ID NO: 849 - protein, 33 aa, artificial; identical to SEQ ID NO: 97
  Completely synthesized peptide construct
  MISC_FEATURE (1)..(1): X is T or S
  MISC_FEATURE (2)..(2): X is A and G
  MISC_FEATURE (3)..(3): X is A and G
  MISC_FEATURE (4)..(4): X is K, R or H for basic amino acids
  MISC_FEATURE (5)..(5): X is F or P
  MISC_FEATURE (6)..(6): X is A and G
  MISC_FEATURE (7)..(7): X is I, L or V
  MISC_FEATURE (8)..(8): X is A and G
  MISC_FEATURE (9)..(9): X is A and G
  MISC_FEATURE (10)..(10): X is F, W or Y for aromatic amino acids
  MISC_FEATURE (11)..(11): X is K, R or H for basic amino acids
  MISC_FEATURE (12)..(12): X is A and G
  MISC_FEATURE (13)..(13): X is D and E for acidic amino acids
  MISC_FEATURE (14)..(14): X is N or Q for amidated amino acids
  MISC_FEATURE (15)..(15): X is A and G
  MISC_FEATURE (16)..(16): X is F or P
  MISC_FEATURE (17)..(17): X is K, R or H for basic amino acids
  MISC_FEATURE (18)..(18): X is A and G
  MISC_FEATURE (19)..(19): X is D and E for acidic amino acids
  MISC_FEATURE (20)..(20): X is F or P
  MISC_FEATURE (21)..(21): X is A and G
  MISC_FEATURE (22)..(22): X is A and G
  MISC_FEATURE (23)..(23): X is A and G
  MISC_FEATURE (24)..(24): X is Acetyl or propionyl group, D glycine or D alanine, Cyclohexylalanine at amino terminus
  MISC_FEATURE (25)..(25): X is Gaba for X2X3 or X3X2 or X2X3 or X3X2 or X3X3 or X2X2
  MISC_FEATURE (26)..(26): X is K, R or H for basic amino acids
  MISC_FEATURE (27)..(27): X is N or Q for amidated amino acids
  MISC_FEATURE (28)..(28): X is A and G
  MISC_FEATURE (29)..(29): X is D and E for acidic amino acids
  MISC_FEATURE (30)..(30): X is K, R or H for basic amino acids
  MISC_FEATURE (31)..(31): X is Gaba for X2X3 or X3X2 or X2X3 or X3X2 or X3X3 or X2X2
  MISC_FEATURE (32)..(32): X is K, R or H for basic amino acids
  MISC_FEATURE (33)..(33): X is Gaba for X2X3 or X3X2 or X2X3 or X3X2 or X3X3 or X2X2

SEQ ID NO: 850 - protein, 33 aa, artificial; identical to SEQ ID NO: 97
  Completely synthesized peptide construct
  MISC_FEATURE (1)..(1): X is T or S
  MISC_FEATURE (2)..(2): X is A and G
  MISC_FEATURE (3)..(3): X is A and G
  MISC_FEATURE (4)..(4): X is K, R or H for basic amino acids
  MISC_FEATURE (5)..(5): X is F or P
  MISC_FEATURE (6)..(6): X is A and G
  MISC_FEATURE (7)..(7): X is I, L or V
  MISC_FEATURE (8)..(8): X is A and G
  MISC_FEATURE (9)..(9): X is A and G
  MISC_FEATURE (10)..(10): X is F, W or Y for aromatic amino acids
  MISC_FEATURE (11)..(11): X is K, R or H for basic amino acids
  MISC_FEATURE (12)..(12): X is A and G
  MISC_FEATURE (13)..(13): X is D and E for acidic amino acids
  MISC_FEATURE (14)..(14): X is N or Q for amidated amino acids
  MISC_FEATURE (15)..(15): X is A and G
  MISC_FEATURE (16)..(16): X is F or P
  MISC_FEATURE (17)..(17): X is K, R or H for basic amino acids
  MISC_FEATURE (18)..(18): X is A and G
  MISC_FEATURE (19)..(19): X is D and E for acidic amino acids
  MISC_FEATURE (20)..(20): X is F or P
  MISC_FEATURE (21)..(21): X is A and G
  MISC_FEATURE (22)..(22): X is A and G
  MISC_FEATURE (23)..(23): X is A and G
  MISC_FEATURE (24)..(24): X is Acetyl or propionyl group, D glycine or D alanine, Cyclohexylalanine at amino terminus
  MISC_FEATURE (25)..(25): X is 5-aminopentanoic acid for replacement of 3 or 4 amino acids of X2 and  X3
  MISC_FEATURE (26)..(26): X is K, R or H for basic amino acids
  MISC_FEATURE (27)..(27): X is N or Q for amidated amino acids
  MISC_FEATURE (28)..(28): X is A and G
  MISC_FEATURE (29)..(29): X is D and E for acidic amino acids
  MISC_FEATURE (30)..(30): X is K, R or H for basic amino acids
  MISC_FEATURE (31)..(31): X is Gaba for X2X3 or X3X2 or X2X3 or X3X2 or X3X3 or X2X2
  MISC_FEATURE (32)..(32): X is K, R or H for basic amino acids
  MISC_FEATURE (33)..(33): X is Gaba for X2X3 or X3X2 or X2X3 or X3X2 or X3X3 or X2X2

SEQ ID NO: 851 - protein, 33 aa, artificial; identical to SEQ ID NO: 97
  Completely synthesized peptide construct
  MISC_FEATURE (1)..(1): X is T or S
  MISC_FEATURE (2)..(2): X is X1X1 or X1X3 or X3X1 or X1X2 or X2X1
  MISC_FEATURE (3)..(3): X is K, R or H for basic amino acids
  MISC_FEATURE (4)..(4): X is F or P
  MISC_FEATURE (5)..(5): X is Gaba for X2X3 or X3X2 or X2X3 or X3X2 or X3X3 or X2X2
  MISC_FEATURE (6)..(6): X is X1X1 or X1X3 or X3X1 or X1X2 or X2X1
  MISC_FEATURE (7)..(7): X is F, W or Y for aromatic amino acids
  MISC_FEATURE (8)..(8): X is K, R or H for basic amino acids
  MISC_FEATURE (9)..(9): X is X1X1 or X1X3 or X3X1 or X1X2 or X2X1
  MISC_FEATURE (10)..(10): X is N or Q for amidated amino acids
  MISC_FEATURE (11)..(11): X is A and G
  MISC_FEATURE (12)..(12): X is F or P
  MISC_FEATURE (13)..(13): X is K, R or H for basic amino acids
  MISC_FEATURE (14)..(14): X is X1X1 or X1X3 or X3X1 or X1X2 or X2X1
  MISC_FEATURE (15)..(15): X is F or P
  MISC_FEATURE (16)..(16): X is A and G
  MISC_FEATURE (17)..(17): X is A and G
  MISC_FEATURE (18)..(18): X is A and G
  MISC_FEATURE (19)..(19): X is D and E for acidic amino acids
  MISC_FEATURE (20)..(20): X is A and G
  MISC_FEATURE (21)..(21): X is N or Q for amidated amino acids
  MISC_FEATURE (22)..(22): X is D and E for acidic amino acids
  MISC_FEATURE (23)..(23): X is D and E for acidic amino acids
  MISC_FEATURE (24)..(24): X is K, R or H for basic amino acids
  MISC_FEATURE (25)..(25): X is A and G
  MISC_FEATURE (26)..(26): X is A and G
  MISC_FEATURE (27)..(27): X is I, L or V
  MISC_FEATURE (28)..(28): X is I, L or V
  MISC_FEATURE (29)..(29): X is C or S
  MISC_FEATURE (30)..(30): X is T or S
  MISC_FEATURE (31)..(31): X is A and G
  MISC_FEATURE (32)..(32): X is I, L or V
  MISC_FEATURE (33)..(33): X is I, L or V

SEQ ID NO: 852 - protein, 34 aa, artificial; identical to SEQ ID NO: 77
  Completely synthesized peptide construct
  MISC_FEATURE (1)..(1): X isT or S
  MISC_FEATURE (2)..(2): X is X1X1 or X1X3 or X3X1 or X1X2 or X2X1
  MISC_FEATURE (3)..(3): X is K, R or H for basic amino acids
  MISC_FEATURE (4)..(4): X is F or P
  MISC_FEATURE (5)..(5): X is Gaba for X2X3 or X3X2 or X2X3 or X3X2 or X3X3 or X2X2
  MISC_FEATURE (6)..(6): X is X1X1 or X1X3 or X3X1 or X1X2 or X2X1
  MISC_FEATURE (7)..(7): X is F, W or Y for aromatic amino acids
  MISC_FEATURE (8)..(8): X is K, R or H for basic amino acids
  MISC_FEATURE (9)..(9): X is X1X1 or X1X3 or X3X1 or X1X2 or X2X1
  MISC_FEATURE (10)..(10): X is N or Q for amidated amino acids
  MISC_FEATURE (11)..(11): X is A and G
  MISC_FEATURE (12)..(12): X is F or P
  MISC_FEATURE (13)..(13): X is K, R or H for basic amino acids
  MISC_FEATURE (14)..(14): X is X1X1 or X1X3 or X3X1 or X1X2 or X2X1
  MISC_FEATURE (15)..(15): X is F or P
  MISC_FEATURE (16)..(16): X is A and G
  MISC_FEATURE (17)..(17): X is A and G
  MISC_FEATURE (18)..(18): X is A and G
  MISC_FEATURE (19)..(19): X is Acetyl or propionyl group, D glycine or D alanine, Cyclohexylalanine at amino terminus
  MISC_FEATURE (20)..(20): X is D and E for acidic amino acids
  MISC_FEATURE (21)..(21): X is A and G
  MISC_FEATURE (22)..(22): X is N or Q for amidated amino acids
  MISC_FEATURE (23)..(23): X is D and E for acidic amino acids
  MISC_FEATURE (24)..(24): X is D and E for acidic amino acids
  MISC_FEATURE (25)..(25): X is K, R or H for basic amino acids
  MISC_FEATURE (26)..(26): X is A and G
  MISC_FEATURE (27)..(27): X is A and G
  MISC_FEATURE (28)..(28): X is I, L or V
  MISC_FEATURE (29)..(29): X is I, L or V
  MISC_FEATURE (30)..(30): X is C or S
  MISC_FEATURE (31)..(31): X is T or S
  MISC_FEATURE (32)..(32): X is A and G
  MISC_FEATURE (33)..(33): X is I, L or V
  MISC_FEATURE (34)..(34): X is I, L or V

SEQ ID NO: 853 - protein, 34 aa, artificial; identical to SEQ ID NO: 77
  Completely synthesized peptide construct
  MISC_FEATURE (1)..(1): X is T or S
  MISC_FEATURE (2)..(2): X is X1X1 or X1X3 or X3X1 or X1X2 or X2X1
  MISC_FEATURE (3)..(3): X is K, R or H for basic amino acids
  MISC_FEATURE (4)..(4): X is F or P
  MISC_FEATURE (5)..(5): X is Gaba for X2X3 or X3X2 or X2X3 or X3X2 or X3X3 or X2X2
  MISC_FEATURE (6)..(6): X is X1X1 or X1X3 or X3X1 or X1X2 or X2X1
  MISC_FEATURE (7)..(7): X is F, W or Y for aromatic amino acids
  MISC_FEATURE (8)..(8): X is K, R or H for basic amino acids
  MISC_FEATURE (9)..(9): X is X1X1 or X1X3 or X3X1 or X1X2 or X2X1
  MISC_FEATURE (10)..(10): X is N or Q for amidated amino acids
  MISC_FEATURE (11)..(11): X is A and G
  MISC_FEATURE (12)..(12): X is F or P
  MISC_FEATURE (13)..(13): X is K, R or H for basic amino acids
  MISC_FEATURE (14)..(14): X is X1X1 or X1X3 or X3X1 or X1X2 or X2X1
  MISC_FEATURE (15)..(15): X is F or P
  MISC_FEATURE (16)..(16): X is A and G
  MISC_FEATURE (17)..(17): X is A and G
  MISC_FEATURE (18)..(18): X is A and G
  MISC_FEATURE (19)..(19): X is 5-aminopentanoic acid for replacement of 3 or 4 amino acids of X2 and  X3
  MISC_FEATURE (20)..(20): X is D and E for acidic amino acids
  MISC_FEATURE (21)..(21): X is A and G
  MISC_FEATURE (22)..(22): X is N or Q for amidated amino acids
  MISC_FEATURE (23)..(23): X is D and E for acidic amino acids
  MISC_FEATURE (24)..(24): X is D and E for acidic amino acids
  MISC_FEATURE (25)..(25): X is K, R or H for basic amino acids
  MISC_FEATURE (26)..(26): X is A and G
  MISC_FEATURE (27)..(27): X is A and G
  MISC_FEATURE (28)..(28): X is I, L or V
  MISC_FEATURE (29)..(29): X is I, L or V
  MISC_FEATURE (30)..(30): X is C or S
  MISC_FEATURE (31)..(31): X is T or S
  MISC_FEATURE (32)..(32): X is A an G
  MISC_FEATURE (33)..(33): X is I, L or V
  MISC_FEATURE (34)..(34): X is I, L or V

SEQ ID NO: 854 - protein, 31 aa, artificial; identical to SEQ ID NO: 123
  Completely synthesized peptide construct
  MISC_FEATURE (1)..(1): X is T or S
  MISC_FEATURE (2)..(2): X is X1X1 or X1X3 or X3X1 or X1X2 or X2X1
  MISC_FEATURE (3)..(3): X is K, R or H for basic amino acids
  MISC_FEATURE (4)..(4): X is F or P
  MISC_FEATURE (5)..(5): X is Gaba for X2X3 or X3X2 or X2X3 or X3X2 or X3X3 or X2X2
  MISC_FEATURE (6)..(6): X is X1X1 or X1X3 or X3X1 or X1X2 or X2X1
  MISC_FEATURE (7)..(7): X is F, W or Y for aromatic amino acids
  MISC_FEATURE (8)..(8): X is K, R or H for basic amino acids
  MISC_FEATURE (9)..(9): X is X1X1 or X1X3 or X3X1 or X1X2 or X2X1
  MISC_FEATURE (10)..(10): X is N or Q for amidated amino acids
  MISC_FEATURE (11)..(11): X is A and G
  MISC_FEATURE (12)..(12): X is F or P
  MISC_FEATURE (13)..(13): X is K, R or H for basic amino acids
  MISC_FEATURE (14)..(14): X is X1X1 or X1X3 or X3X1 or X1X2 or X2X1
  MISC_FEATURE (15)..(15): X is F or P
  MISC_FEATURE (16)..(16): X is Acetyl or propionyl group, D glycine or D alanine, Cyclohexylalanine at amino terminus
  MISC_FEATURE (17)..(17): X is A and G
  MISC_FEATURE (18)..(18): X is A and G
  MISC_FEATURE (19)..(19): X is A and G
  MISC_FEATURE (20)..(20): X is D and E for acidic amino acids
  MISC_FEATURE (21)..(21): X is A and G
  MISC_FEATURE (22)..(22): X is N or Q for amidated amino acids
  MISC_FEATURE (23)..(23): X is Gaba for X2X3 or X3X2 or X2X3 or X3X2 or X3X3 or X2X2
  MISC_FEATURE (24)..(24): X is K, R or H for basic amino acids
  MISC_FEATURE (25)..(25): X is A and G
  MISC_FEATURE (26)..(26): X is A and G
  MISC_FEATURE (27)..(27): X is Gaba for X2X3 or X3X2 or X2X3 or X3X2 or X3X3 or X2X2
  MISC_FEATURE (28)..(28): X is C or S
  MISC_FEATURE (29)..(29): X is T or S
  MISC_FEATURE (30)..(30): X is A and G
  MISC_FEATURE (31)..(31): X is Gaba for X2X3 or X3X2 or X2X3 or X3X2 or X3X3 or X2X2

SEQ ID NO: 855 - protein, 20 aa, Mus musculus
DAGEPGIAGFKGDQGPKGET

SEQ ID NO: 856 - protein, 46 aa, Artificial Sequence
  Heteroconjugate construct
DLLKNGERIEKVEGGGDAEFRHDSGYEVHHQKLVFFAENVGSNKAI

SEQ ID NO: 857 - protein, 41 aa, Artificial Sequence
  Heteroconjugate construct
DLLKNGERIEKVEGGGKRKLEGDLKLTQESIMDLENDKQQL

SEQ ID NO: 858 - protein, 37 aa, Artificial Sequence
  Heteroconjugate construct
DLLKNGERIEKVEGGGAKVTKNITEIADLTQKIFDLR

SEQ ID NO: 859 - protein, 35 aa, Artificial Sequence
  Heteroconjugate construct
DLLKNGERIEKVEGGGVRRLAMENNIKLSEVVGSG

SEQ ID NO: 860 - protein, 34 aa, Artificial Sequence
  Heteroconjugate construct
DLLKNGERIEKVEGGGKEALISSLTRGKLTYTQQ

SEQ ID NO: 861 - protein, 34 aa, Artificial Sequence
  Heteroconjugate construct
DLLKNGERIEKVEGGGSERVQLLHSQNTSLINQK

SEQ ID NO: 862 - protein, 35 aa, Artificial Sequence
  Heteroconjugate construct
DLLKNGERIEKVEGGGYSDVWSFGVVLWEIATLAE

SEQ ID NO: 863 - protein, 31 aa, Artificial Sequence
  Heteroconjugate construct
DLLKNGERIEKVEGGGSHLVEALYLVCGERG

SEQ ID NO: 864 - protein, 40 aa, Artificial Sequence
  Heteroconjugate construct
DLLKNGERIEKVEGGGVLGGGCALLRCIPALDSLTPANED

SEQ ID NO: 865 - protein, 35 aa, Artificial Sequence
  Heteroconjugate construct
DLLKNGERIEKVEGGGIPPSLRYLEDEERMSRLSK

SEQ ID NO: 866 - protein, 36 aa, Artificial Sequence
  Heteroconjugate construct
DLLKNGERIEKVEGGGNTNMFTYEIAPVFVLLEYVT

SEQ ID NO: 867 - protein, 36 aa, Artificial Sequence
  Heteroconjugate construct
DLLKNGERIEKVEGGGVVKSFDRSTKVIDFHYPNEL

SEQ ID NO: 868 - protein, 37 aa, Artificial Sequence
  Heteroconjugate construct
DLLKNGERIEKVEGGGVSSVSSQFSDAAQASPSSHSS

SEQ ID NO: 869 - protein, 37 aa, Artificial Sequence
  Heteroconjugate construct
DLLKNGERIEKVEGGGMVWESGCTVIVMLTPLVEDGV

SEQ ID NO: 870 - protein, 35 aa, Artificial Sequence
  Heteroconjugate construct
DLLKNGERIEKVEGGGFYLKNVQTQETRTLTQFHF

SEQ ID NO: 871 - protein, 36 aa, Artificial Sequence
  Heteroconjugate construct
DLLKNGERIEKVEGGGDGEAGKPGKAGERGPPGPQG

SEQ ID NO: 872 - protein, 36 aa, Artificial Sequence
  Heteroconjugate construct
DLLKNGERIEKVEGGGGLDGAKGEAGAPGVKGESGS

SEQ ID NO: 873 - protein, 36 aa, Artificial Sequence
  Heteroconjugate construct
DLLKNGERIEKVEGGGERGAAGIAGDKGDRGDVGEK

SEQ ID NO: 874 - protein, 33 aa, Artificial Sequence
  Heteroconjugate construct
DLLKNGERIEKVEGGGDGRGDSLAYGLRSKSKK

SEQ ID NO: 875 - protein, 31 aa, Artificial Sequence
  Heteroconjugate construct
DLLKNGERIEKVEGGGQKRAAYKQYGHAAFE

SEQ ID NO: 876 - protein, 30 aa, Artificial Sequence
  Heteroconjugate construct
DLLKNGERIEKVEGGGERAAYDQYGHAAFE

SEQ ID NO: 877 - protein, 35 aa, Artificial Sequence
  Heteroconjugate construct
DLLKNGERIEKVEGGGCRVLGGGGTGGGGGLGGPG

SEQ ID NO: 878 - protein, 35 aa, Artificial Sequence
  Heteroconjugate construct
DLLKNGERIEKVEGGGCLGLLAVAAVAAAGANPAQ

SEQ ID NO: 879 - protein, 32 aa, Artificial Sequence
  Heteroconjugate construct
DLLKNGERIEKVEGGGNVREGIAFRPASKFTV

SEQ ID NO: 880 - protein, 30 aa, Artificial Sequence
  Heteroconjugate construct
  misc_feature (18)..(18): Xaa can be any naturally occurring amino acid
  misc_feature (25)..(25): Xaa can be any naturally occurring amino acid
DLLKNGERIEKVEGGGEXIKFAAAXREGED

SEQ ID NO: 881 - protein, 34 aa, Artificial Sequence
  Heteroconjugate construct
DLLKNGERIEKVEGGGVVHFFKNIVTPRTPPPSQ

SEQ ID NO: 882 - protein, 30 aa, Artificial Sequence
  Heteroconjugate construct
DLLKNGERIEKVEGGGVVHFFKNIVTPRTP

SEQ ID NO: 883 - protein, 39 aa, Artificial Sequence
  Heteroconjugate construct
DLLKNGERIEKVEGGGLERVCHSLGKWLGHPDKFVGITY

SEQ ID NO: 884 - protein, 37 aa, Artificial Sequence
  Heteroconjugate construct
DLLKNGERIEKVEGGGSTFKNTEISFKLGQEFEETTA

SEQ ID NO: 885 - protein, 27 aa, Artificial Sequence
  Heteroconjugate construct
DLLKNGERIEKVEGGGSLDGELKALFK

SEQ ID NO: 886 - protein, 34 aa, Artificial Sequence
  Heteroconjugate construct
DLLKNGERIEKVEGGGIYFNTWTTCQSIAFPSKT

SEQ ID NO: 887 - protein, 39 aa, Artificial Sequence
  Heteroconjugate construct
DLLKNGERIEKVEGGGQKFSEHFSIHCCPPFTFLNSSKR

SEQ ID NO: 888 - protein, 36 aa, Artificial Sequence
  Heteroconjugate construct
DLLKNGERIEKVEGGGGQFRVIGPRHPIRALVGDEV

SEQ ID NO: 889 - protein, 36 aa, Artificial Sequence
  Heteroconjugate construct
DLLKNGERIEKVEGGGNATGMEVGWYRPPFSRVVHL

SEQ ID NO: 890 - protein, 36 aa, Artificial Sequence
  Heteroconjugate construct
DLLKNGERIEKVEGGGSDEGGFTCFFRDHSYQEEAA

SEQ ID NO: 891 - protein, 36 aa, Artificial Sequence
  Heteroconjugate construct
DLLKNGERIEKVEGGGQAPEYRGRTELLKDAIGEGK

SEQ ID NO: 892 - protein, 31 aa, Artificial Sequence
  Heteroconjugate construct
DLLKNGERIEKVEGGGENPVVHFFKNIVTPR

SEQ ID NO: 893 - protein, 32 aa, Artificial Sequence
  Heteroconjugate construct
DLLKNGERIEKVEGGGQSIAFPSKTSASIGSL

SEQ ID NO: 894 - protein, 36 aa, Artificial Sequence
  Heteroconjugate construct
DLLKNGERIEKVEGGGSKTSASIGSLCADARMYGVL

SEQ ID NO: 895 - protein, 35 aa, Artificial Sequence
  Heteroconjugate construct
DLLKNGERIEKVEGGGGGFTCFFRDHSYQEEAAME

SEQ ID NO: 896 - protein, 38 aa, Artificial Sequence
  Heteroconjugate construct
DLLKNGERIEKVEGGGGRTQDVVHFFKNIVTPRTPPPS

SEQ ID NO: 897 - protein, 36 aa, Artificial Sequence
  Heteroconjugate construct
DLLKNGERIEKVEGGGTGTEKLIETYFSKNYQDYEY

SEQ ID NO: 898 - protein, 29 aa, Artificial Sequence
  Heteroconjugate construct
DLLKNGERIEKVEGGGHSLGKWLGHPDKF

SEQ ID NO: 899 - protein, 32 aa, Artificial Sequence
  Heteroconjugate construct
DLLKNGERIEKVEGGGVGWYRPPFSRVVHLYR

SEQ ID NO: 900 - protein, 32 aa, Artificial Sequence
  Heteroconjugate construct
DLLKNGERIEKVEGGGVFLCLQYRLRGKLRAE

SEQ ID NO: 901 - protein, 30 aa, Artificial Sequence
  Heteroconjugate construct
DLLKNGERIEKVEGGGDGSSWEGVGVVPDV

SEQ ID NO: 902 - protein, 41 aa, Artificial Sequence
  Heteroconjugate construct
DLLKNGERIEKVEGGGNGMLHGDKVSFFCKNKEKKCSYTED

SEQ ID NO: 903 - protein, 39 aa, Artificial Sequence
  Heteroconjugate construct
DLLKNGERIEKVEGGGTVFLLVIVELIPSTSSAVPLIGK

SEQ ID NO: 904 - protein, 34 aa, Artificial Sequence
  Heteroconjugate construct
DLLKNGERIEKVEGGGDTPYLDITYHFVMQRLPL

SEQ ID NO: 905 - protein, 29 aa, Artificial Sequence
  Heteroconjugate construct
DLLKNGERIEKVEGGGVIVELIPSTSSAV

SEQ ID NO: 906 - protein, 35 aa, Artificial Sequence
  Heteroconjugate construct
DLLKNGERIEKVEGGGNYLADEEEEAEEEARVTVV

SEQ ID NO: 907 - protein, 35 aa, Artificial Sequence
  Heteroconjugate construct
DLLKNGERIEKVEGGGILQVTSLLILLLLLIKAAQ

SEQ ID NO: 908 - protein, 35 aa, Artificial Sequence
  Heteroconjugate construct
DLLKNGERIEKVEGGGECPLDPGGYFIVKGVEKVI

SEQ ID NO: 909 - protein, 35 aa, Artificial Sequence
  Heteroconjugate construct
DLLKNGERIEKVEGGGGGLRLGEMERDCLIGYGAS

SEQ ID NO: 910 - protein, 34 aa, Artificial Sequence
  Heteroconjugate construct
DLLKNGERIEKVEGGGMSETAPAAPAAPAPAEKT

SEQ ID NO: 911 - protein, 35 aa, Artificial Sequence
  Heteroconjugate construct
DLLKNGERIEKVEGGGGGGFRGGRGGGGGGFRGGR

SEQ ID NO: 912 - protein, 35 aa, Artificial Sequence
  Heteroconjugate construct
DLLKNGERIEKVEGGGIPKNLLDSKSLKLIISMTL

SEQ ID NO: 913 - protein, 35 aa, Artificial Sequence
  Heteroconjugate construct
DLLKNGERIEKVEGGGQHLHNNRIIHRDVKGNNIL

SEQ ID NO: 914 - protein, 35 aa, Artificial Sequence
  Heteroconjugate construct
DLLKNGERIEKVEGGGRSRSFSKSRSRSRSLSRSR

SEQ ID NO: 915 - protein, 35 aa, Artificial Sequence
  Heteroconjugate construct
DLLKNGERIEKVEGGGGTRLHGGKDAASPRYIFTM

SEQ ID NO: 916 - protein, 35 aa, Artificial Sequence
  Heteroconjugate construct
DLLKNGERIEKVEGGGAPGFPGAVGPAGPPGLQGP

SEQ ID NO: 917 - protein, 21 aa, Homo sapiens
AKVTKNITEIADLTQKIFDLR

SEQ ID NO: 918 - protein, 20 aa, Homo sapiens
VVKSFDRSTKVIDFHYPNEL

SEQ ID NO: 919 - protein, 9 aa, Homo sapiens
GGGTGGGGG

SEQ ID NO: 920 - protein, 19 aa, Homo sapiens
CRVLGGGGTGGGGGLGGPG

SEQ ID NO: 921 - protein, 9 aa, Homo sapiens
AVAAVAAAG

SEQ ID NO: 922 - protein, 19 aa, Homo sapiens
CLGLLAVAAVAAAGANPAQ

SEQ ID NO: 923 - protein, 14 aa, Homo sapiens
VVHFFKNIVTPRTP

SEQ ID NO: 924 - protein, 23 aa, Homo sapiens
LERVCHSLGKWLGHPDKFVGITY

SEQ ID NO: 925 - protein, 21 aa, Homo sapiens
STFKNTEISFKLGQEFEETTA

SEQ ID NO: 926 - protein, 22 aa, Homo sapiens
GRTQDVVHFFKNIVTPRTPPPS

SEQ ID NO: 927 - protein, 25 aa, Homo sapiens
NGMLHGDKVSFFCKNKEKKCSYTED

SEQ ID NO: 928 - protein, 19 aa, Homo sapiens
NYLADEEEEAEEEARVTVV

SEQ ID NO: 929 - protein, 19 aa, Homo sapiens
ILQVTSLLILLLLLIKAAQ

SEQ ID NO: 930 - protein, 9 aa, Homo sapiens
PGGYFIVKG

SEQ ID NO: 931 - protein, 19 aa, Homo sapiens
ECPLDPGGYFIVKGVEKVI

SEQ ID NO: 932 - protein, 19 aa, Homo sapiens
GGLRLGEMERDCLIGYGAS

SEQ ID NO: 933 - protein, 9 aa, Homo sapiens
APAAPAAPA

SEQ ID NO: 934 - protein, 18 aa, Homo sapiens
MSETAPAAPAAPAPAEKT

SEQ ID NO: 935 - protein, 9 aa, Homo sapiens
GGRGGGGGG

SEQ ID NO: 936 - protein, 19 aa, Homo sapiens
GGGFRGGRGGGGGGFRGGR

SEQ ID NO: 937 - protein, 9 aa, Homo sapiens
LDSKSLKLI

SEQ ID NO: 938 - protein, 19 aa, Homo sapiens
IPKNLLDSKSLKLIISMTL

SEQ ID NO: 939 - protein, 9 aa, Homo sapiens
NRIIHRDVK

SEQ ID NO: 940 - protein, 19 aa, Homo sapiens
QHLHNNRIIHRDVKGNNIL

SEQ ID NO: 941 - protein, 9 aa, Homo sapiens
SKSRSRSRS

SEQ ID NO: 942 - protein, 19 aa, Homo sapiens
RSRSFSKSRSRSRSLSRSR

SEQ ID NO: 943 - protein, 9 aa, Homo sapiens
GGKDAASPR

SEQ ID NO: 944 - protein, 19 aa, Homo sapiens
GTRLHGGKDAASPRYIFTM

SEQ ID NO: 945 - protein, 9 aa, Homo sapiens
GAVGPAGPP

SEQ ID NO: 946 - protein, 19 aa, Homo sapiens
APGFPGAVGPAGPPGLQGP

SEQ ID NO: 947 - protein, 9 aa, Homo sapiens
EEEEAEEEA

SEQ ID NO: 948 - protein, 9 aa, Homo sapiens
SLLILLLLL

SEQ ID NO: 949 - protein, 9 aa, Homo sapiens
GEMERDCLI

SEQ ID NO: 950 - protein, 19 aa, Homo sapiens
GGFTCFFRDHSYQEEAAME

SEQ ID NO: 951 - protein, 23 aa, Homo sapiens
TVFLLVIVELIPSTSSAVPLIGK

SEQ ID NO: 952 - protein, 16 aa, herpes simplex virus 7
SLKMADPNRFRGKDLP

SEQ ID NO: 953 - protein, 32 aa, Artificial Sequence
  Heteroconjugate construct
DLLKNGERIEKVEGGGSLKMADPNRFRGKDLP

SEQ ID NO: 954 - protein, 30 aa, Human immunodeficiency virus
YSVHQRIDVKDTKEALEKIEEEQNKSKKKA

SEQ ID NO: 955 - protein, 46 aa, Artificial Sequence
  Heteroconjugate construct
DLLKNGERIEKVEGGGYSVHQRIDVKDTKEALEKIEEEQNKSKKKA

SEQ ID NO: 956 - protein, 36 aa, Artificial Sequence
  Heteroconjugate construct
DLLKNGERIEKVEGGGDAGEPGIAGFKGDQGPKGET

SEQ ID NO: 957 - protein, 9 aa, Homo sapiens
SFGVVLWEI

SEQ ID NO: 958 - protein, 19 aa, Homo sapiens
YSDVWSFGVVLWEIATLAE

SEQ ID NO: 959 - protein, 18 aa, Homo sapiens
VVHFFKNIVTPRTPPPSQ

SEQ ID NO: 960 - protein, 15 aa, Homo sapiens
DAEFRHDSGYEVHHQ

SEQ ID NO: 961 - protein, 18 aa, Homo sapiens
KLVFFAEDVGSNKGAIIG

SEQ ID NO: 962 - protein, 12 aa, Homo sapiens
GARGLTGRPGDA

SEQ ID NO: 963 - protein, 20 aa, Homo sapiens
PGLPGARGLTGRPGDAGPQG

SEQ ID NO: 964 - protein, 31 aa, Artificial Sequence
  Artificial construct containing amino acids 38-50 from the human beta-2-microglobulin chain
DLLKNGERIEKVEGGGDAEFRHDSGYEVHHQ

SEQ ID NO: 965 - protein, 34 aa, Artificial Sequence
  Artificial construct containing amino acids 38-50 from the human beta-2-microglobulin chain
DLLKNGERIEKVEGGGKLVFFAEDVGSNKGAIIG

SEQ ID NO: 966 - protein, 36 aa, Artificial Sequence
  Artificial construct containing amino acids 38-50 from the human beta-2-microglobulin chain
DLLKNGERIEKVEGGGPGLPGARGLTGRPGDAGPQG

SEQ ID NO: 967 - protein, 19 aa, Homo sapiens
ASSSILINESEPTTNIQIR

SEQ ID NO: 968 - protein, 17 aa, Homo sapiens
FAALDDEEEDKEEEIIK

SEQ ID NO: 969 - protein, 13 aa, Homo sapiens
QLVNMCMNPDPEK

SEQ ID NO: 970 - protein, 9 aa, Homo sapiens
YLSGANLNL

SEQ ID NO: 971 - protein, 15 aa, Homo sapiens
YACFVSNLATGRNNS

SEQ ID NO: 972 - protein, 9 aa, Homo sapiens
GVALQTMKQ

SEQ ID NO: 973 - protein, 9 aa, Homo sapiens
KIFGSLAFL

SEQ ID NO: 974 - protein, 9 aa, Homo sapiens
RLLQETELV

SEQ ID NO: 975 - protein, 9 aa, Homo sapiens
ALCRWGLLL

SEQ ID NO: 976 - protein, 9 aa, Homo sapiens
HLYQGCQVV

SEQ ID NO: 977 - protein, 10 aa, Homo sapiens
YLVPQQGFFC

SEQ ID NO: 978 - protein, 16 aa, Homo sapiens
VPIKWMALWSILRRRF

SEQ ID NO: 979 - protein, 9 aa, Homo sapiens
STAPPAHGV

SEQ ID NO: 980 - protein, 9 aa, Homo sapiens
LLNQLQVNL

SEQ ID NO: 981 - protein, 13 aa, Homo sapiens
DRAHYNIVTFCCK

SEQ ID NO: 982 - protein, 9 aa, Homo sapiens
STYKNENFK

SEQ ID NO: 983 - protein, 9 aa, Homo sapiens
SAPRTSTKK

SEQ ID NO: 984 - protein, 9 aa, Homo sapiens
TSESQLFNK

SEQ ID NO: 985 - protein, 9 aa, Homo sapiens
KTLEERVKK

SEQ ID NO: 986 - protein, 9 aa, Homo sapiens
RLQCVQCKK

SEQ ID NO: 987 - protein, 9 aa, Homo sapiens
ILIRCIICQ

SEQ ID NO: 988 - protein, 10 aa, Homo sapiens
YMLDLQPETT

SEQ ID NO: 989 - protein, 10 aa, Homo sapiens
LLAARAIVAI

SEQ ID NO: 990 - protein, 9 aa, Homo sapiens
ALCNTDSPL

SEQ ID NO: 991 - protein, 9 aa, Homo sapiens
ILLWQPIPV

SEQ ID NO: 992 - protein, 9 aa, Homo sapiens
KLQCVDLHV

SEQ ID NO: 993 - protein, 16 aa, Homo sapiens
FLRPGDDSSHDLNLLR

SEQ ID NO: 994 - protein, 16 aa, Homo sapiens
FQELESETLKSEEFQK

SEQ ID NO: 995 - protein, 21 aa, Homo sapiens
GLESNVNVELLNALHSHMNKR

SEQ ID NO: 996 - protein, 10 aa, Homo sapiens
REPVTKAEML

SEQ ID NO: 997 - protein, 9 aa, Homo sapiens
EVDPIGHLY

SEQ ID NO: 998 - protein, 9 aa, Homo sapiens
SVYDFFVWL

SEQ ID NO: 999 - protein, 9 aa, Homo sapiens
MSLQRQFLR

SEQ ID NO: 1000 - protein, 14 aa, Homo sapiens
AGDFLEANYMNLQR

SEQ ID NO: 1001 - protein, 20 aa, Homo sapiens
ILLQGTPVAQMTEDAVDAER

SEQ ID NO: 1002 - protein, 10 aa, Homo sapiens
KGYTQQLAFR

SEQ ID NO: 1003 - protein, 12 aa, Homo sapiens
QPSSAFAAFVKR

SEQ ID NO: 1004 - protein, 6 aa, Homo sapiens
WLNEQR

SEQ ID NO: 1005 - protein, 24 aa, Homo sapiens
FTPTETNKAEQCCEETASSISLHG

SEQ ID NO: 1006 - protein, 23 aa, Homo sapiens
QYTGTSYDPELTESSGSASHIDC

SEQ ID NO: 1007 - protein, 17 aa, Homo sapiens
FLKKHNLNPARKYFPQW

SEQ ID NO: 1008 - protein, 19 aa, Homo sapiens
FLKKHNLNPARKYFPQWEA

SEQ ID NO: 1009 - protein, 30 aa, Homo sapiens
ETKKTEDRFVPSSSKSEGKKSREQPSVLSR

SEQ ID NO: 1010 - protein, 24 aa, Homo sapiens
DAHKSEVAHRFKDLGEENFKALVL

SEQ ID NO: 1011 - protein, 36 aa, Homo sapiens
SIPPEVKFNKPFVFLMIEQNTKSPLFMGKVVNPTQK

SEQ ID NO: 1012 - protein, 17 aa, Homo sapiens
LSLLMWITQCFLPVFLA

SEQ ID NO: 1013 - protein, 19 aa, Artificial Sequence
  Heteroconjugate construct
PPDSSYLSGANLNLSCHSA

SEQ ID NO: 1014 - protein, 25 aa, Artificial Sequence
  Heteroconjugate construct
NNNGTYACFVSNLATGRNNSIVKSI

SEQ ID NO: 1015 - protein, 19 aa, Artificial Sequence
  Heteroconjugate construct
DLCQAGVALQTMKQEFLIN

SEQ ID NO: 1016 - protein, 19 aa, Artificial Sequence
  Heteroconjugate construct
FAGCKKIFGSLAFLPESFD

SEQ ID NO: 1017 - protein, 19 aa, Artificial Sequence
  Heteroconjugate construct
KYTMRRLLQETELVEPLTP

SEQ ID NO: 1018 - protein, 18 aa, Artificial Sequence
  Heteroconjugate construct
MELAALCRWGLLLALLPP

SEQ ID NO: 1019 - protein, 19 aa, Artificial Sequence
  Heteroconjugate construct
LDMLRHLYQGCQVVQGNLE

SEQ ID NO: 1020 - protein, 20 aa, Artificial Sequence
  Heteroconjugate construct
VDAEEYLVPQQGFFCPDPAP

SEQ ID NO: 1021 - protein, 26 aa, Artificial Sequence
  Heteroconjugate construct
ADGGKVPIKWMALWSILRRRFTHQSD

SEQ ID NO: 1022 - protein, 18 aa, Artificial Sequence
  Heteroconjugate construct
STAPPAHGVSTAPPAHGV

SEQ ID NO: 1023 - protein, 19 aa, Artificial Sequence
  Heteroconjugate construct
SDGSVLLNQLQVNLPHVTA

SEQ ID NO: 1024 - protein, 23 aa, Artificial Sequence
  Heteroconjugate construct
GQAEPDRAHYNIVTFCCKCDSTL

SEQ ID NO: 1025 - protein, 19 aa, Artificial Sequence
  Heteroconjugate construct
EVKKESTYKNENFKEYLRH

SEQ ID NO: 1026 - protein, 19 aa, Artificial Sequence
  Heteroconjugate construct
KRPASSAPRTSTKKKKVKR

SEQ ID NO: 1027 - protein, 19 aa, Artificial Sequence
  Heteroconjugate construct
SGSMVTSESQLFNKPYWLQ

SEQ ID NO: 1028 - protein, 19 aa, Artificial Sequence
  Heteroconjugate construct
YSLYGKTLEERVKKPLSEI

SEQ ID NO: 1029 - protein, 19 aa, Artificial Sequence
  Heteroconjugate construct
SVHEIRLQCVQCKKELQRR

SEQ ID NO: 1030 - protein, 19 aa, Artificial Sequence
  Heteroconjugate construct
KPLSEILIRCIICQTPLCP

SEQ ID NO: 1031 - protein, 20 aa, Artificial Sequence
  Heteroconjugate construct
PTLHEYMLDLQPETTDLYCY

SEQ ID NO: 1032 - protein, 20 aa, Artificial Sequence
  Heteroconjugate construct
TWEKLLLAARAIVAIENPAD

SEQ ID NO: 1033 - protein, 19 aa, Artificial Sequence
  Heteroconjugate construct
NLPTIALCNTDSPLRYVDI

SEQ ID NO: 1034 - protein, 19 aa, Artificial Sequence
  Heteroconjugate construct
SIWNPILLWQPIPVHTVPL

SEQ ID NO: 1035 - protein, 19 aa, Artificial Sequence
  Heteroconjugate construct
FLTPKKLQCVDLHVISNDV

SEQ ID NO: 1036 - protein, 24 aa, Artificial Sequence
  Heteroconjugate construct
LLKYRAREPVTKAEMLGSVVGNWQ

SEQ ID NO: 1037 - protein, 19 aa, Artificial Sequence
  Heteroconjugate construct
GIELMEADPIGHLYIFATC

SEQ ID NO: 1038 - protein, 19 aa, Artificial Sequence
  Heteroconjugate construct
FANCSSVYDFFVWLHYYSV

SEQ ID NO: 1039 - protein, 14 aa, Artificial Sequence
  Heteroconjugate construct
MSLQRQFLRTQLWD

SEQ ID NO: 1040 - protein, 24 aa, Artificial Sequence
  Heteroconjugate construct
GSITKAGDFLEANYMNLQRSYTVA

SEQ ID NO: 1041 - protein, 20 aa, Artificial Sequence
  Heteroconjugate construct
LELIKKGYTQQLAFRQPSSA

SEQ ID NO: 1042 - protein, 22 aa, Artificial Sequence
  Heteroconjugate construct
QLAFRQPSSAFAAFVKRAPSTW

SEQ ID NO: 1043 - protein, 16 aa, Artificial Sequence
  Heteroconjugate construct
PPVVRWLNEQRYYGGG

SEQ ID NO: 1044 - protein, 27 aa, Artificial Sequence
  Heteroconjugate construct
SCLQQLSLLMWITQCFLPVFLAQPPSG

SEQ ID NO: 1045 - protein, 35 aa, Artificial Sequence
  Heteroconjugate construct
DLLKNGERIEKVEGGGASSSILINESEPTTNIQIR

SEQ ID NO: 1046 - protein, 33 aa, Artificial Sequence
  Heteroconjugate construct
DLLKNGERIEKVEGGGFAALDDEEEDKEEEIIK

SEQ ID NO: 1047 - protein, 29 aa, Artificial Sequence
  Heteroconjugate construct
DLLKNGERIEKVEGGGQLVNMCMNPDPEK

SEQ ID NO: 1048 - protein, 35 aa, Artificial Sequence
  Heteroconjugate construct
DLLKNGERIEKVEGGGPPDSSYLSGANLNLSCHSA

SEQ ID NO: 1049 - protein, 41 aa, Artificial Sequence
  Heteroconjugate construct
DLLKNGERIEKVEGGGNNNGTYACFVSNLATGRNNSIVKSI

SEQ ID NO: 1050 - protein, 35 aa, Artificial Sequence
  Heteroconjugate construct
DLLKNGERIEKVEGGGDLCQAGVALQTMKQEFLIN

SEQ ID NO: 1051 - protein, 35 aa, Artificial Sequence
  Heteroconjugate construct
DLLKNGERIEKVEGGGFAGCKKIFGSLAFLPESFD

SEQ ID NO: 1052 - protein, 35 aa, Artificial Sequence
  Heteroconjugate construct
DLLKNGERIEKVEGGGKYTMRRLLQETELVEPLTP

SEQ ID NO: 1053 - protein, 34 aa, Artificial Sequence
  Heteroconjugate construct
DLLKNGERIEKVEGGGMELAALCRWGLLLALLPP

SEQ ID NO: 1054 - protein, 35 aa, Artificial Sequence
  Heteroconjugate construct
DLLKNGERIEKVEGGGLDMLRHLYQGCQVVQGNLE

SEQ ID NO: 1055 - protein, 36 aa, Artificial Sequence
  Heteroconjugate construct
DLLKNGERIEKVEGGGVDAEEYLVPQQGFFCPDPAP

SEQ ID NO: 1056 - protein, 42 aa, Artificial Sequence
  Heteroconjugate construct
DLLKNGERIEKVEGGGADGGKVPIKWMALWSILRRRFTHQSD

SEQ ID NO: 1057 - protein, 34 aa, Artificial Sequence
  Heteroconjugate construct
DLLKNGERIEKVEGGGSTAPPAHGVSTAPPAHGV

SEQ ID NO: 1058 - protein, 35 aa, Artificial Sequence
  Heteroconjugate construct
DLLKNGERIEKVEGGGSDGSVLLNQLQVNLPHVTA

SEQ ID NO: 1059 - protein, 39 aa, Artificial Sequence
  Heteroconjugate construct
DLLKNGERIEKVEGGGGQAEPDRAHYNIVTFCCKCDSTL

SEQ ID NO: 1060 - protein, 35 aa, Artificial Sequence
  Heteroconjugate construct
DLLKNGERIEKVEGGGEVKKESTYKNENFKEYLRH

SEQ ID NO: 1061 - protein, 35 aa, Artificial Sequence
  Heteroconjugate construct
DLLKNGERIEKVEGGGKRPASSAPRTSTKKKKVKR

SEQ ID NO: 1062 - protein, 35 aa, Artificial Sequence
  Heteroconjugate construct
DLLKNGERIEKVEGGGSGSMVTSESQLFNKPYWLQ

SEQ ID NO: 1063 - protein, 38 aa, Artificial Sequence
  Heteroconjugate construct
DLLKNGERIEKVEGGGSGSYSLYGKTLEERVKKPLSEI

SEQ ID NO: 1064 - protein, 37 aa, Artificial Sequence
  Heteroconjugate construct
DLLKNGERIEKVEGGGSGSVHEIRLQCVQCKKELQRR

SEQ ID NO: 1065 - protein, 36 aa, Artificial Sequence
  Heteroconjugate construct
DLLKNGERIEKVEGGGSKPLSEILIRCIICQTPLCP

SEQ ID NO: 1066 - protein, 36 aa, Artificial Sequence
  Heteroconjugate construct
DLLKNGERIEKVEGGGPTLHEYMLDLQPETTDLYCY

SEQ ID NO: 1067 - protein, 36 aa, Artificial Sequence
  Heteroconjugate construct
DLLKNGERIEKVEGGGTWEKLLLAARAIVAIENPAD

SEQ ID NO: 1068 - protein, 35 aa, Artificial Sequence
  Heteroconjugate construct
DLLKNGERIEKVEGGGNLPTIALCNTDSPLRYVDI

SEQ ID NO: 1069 - protein, 35 aa, Artificial Sequence
  Heteroconjugate construct
DLLKNGERIEKVEGGGSIWNPILLWQPIPVHTVPL

SEQ ID NO: 1070 - protein, 35 aa, Artificial Sequence
  Heteroconjugate construct
DLLKNGERIEKVEGGGFLTPKKLQCVDLHVISNDV

SEQ ID NO: 1071 - protein, 32 aa, Artificial Sequence
  Heteroconjugate construct
DLLKNGERIEKVEGGGFLRPGDDSSHDLNLLR

SEQ ID NO: 1072 - protein, 32 aa, Artificial Sequence
  Heteroconjugate construct
DLLKNGERIEKVEGGGFQELESETLKSEEFQK

SEQ ID NO: 1073 - protein, 37 aa, Artificial Sequence
  Heteroconjugate construct
DLLKNGERIEKVEGGGGLESNVNVELLNALHSHMNKR

SEQ ID NO: 1074 - protein, 40 aa, Artificial Sequence
  Heteroconjugate construct
DLLKNGERIEKVEGGGLLKYRAREPVTKAEMLGSVVGNWQ

SEQ ID NO: 1075 - protein, 35 aa, Artificial Sequence
  Heteroconjugate construct
DLLKNGERIEKVEGGGGIELMEADPIGHLYIFATC

SEQ ID NO: 1076 - protein, 35 aa, Artificial Sequence
  Heteroconjugate construct
DLLKNGERIEKVEGGGFANCSSVYDFFVWLHYYSV

SEQ ID NO: 1077 - protein, 30 aa, Artificial Sequence
  Heteroconjugate construct
DLLKNGERIEKVEGGGMSLQRQFLRTQLWD

SEQ ID NO: 1078 - protein, 39 aa, Artificial Sequence
  Heteroconjugate construct
DLLKNGERIEKVEGGGSITKAGDFLEANYMNLQRSYTVA

SEQ ID NO: 1079 - protein, 36 aa, Artificial Sequence
  Heteroconjugate construct
DLLKNGERIEKVEGGGILLQGTPVAQMTEDAVDAER

SEQ ID NO: 1080 - protein, 26 aa, Artificial Sequence
  Heteroconjugate construct
DLLKNGERIEKVEGGGKGYTQQLAFR

SEQ ID NO: 1081 - protein, 38 aa, Artificial Sequence
  Heteroconjugate construct
DLLKNGERIEKVEGGGQLAFRQPSSAFAAFVKRAPSTW

SEQ ID NO: 1082 - protein, 32 aa, Artificial Sequence
  Heteroconjugate construct
DLLKNGERIEKVEGGGPPVVRWLNEQRYYGGG

SEQ ID NO: 1083 - protein, 40 aa, Artificial Sequence
  Heteroconjugate construct
DLLKNGERIEKVEGGGFTPTETNKAEQCCEETASSISLHG

SEQ ID NO: 1084 - protein, 39 aa, Artificial Sequence
  Heteroconjugate construct
DLLKNGERIEKVEGGGQYTGTSYDPELTESSGSASHIDC

SEQ ID NO: 1085 - protein, 33 aa, Artificial Sequence
  Heteroconjugate construct
DLLKNGERIEKVEGGGFLKKHNLNPARKYFPQW

SEQ ID NO: 1086 - protein, 35 aa, Artificial Sequence
  Heteroconjugate construct
DLLKNGERIEKVEGGGFLKKHNLNPARKYFPQWEA

SEQ ID NO: 1087 - protein, 46 aa, Artificial Sequence
  Heteroconjugate construct
DLLKNGERIEKVEGGGETKKTEDRFVPSSSKSEGKKSREQPSVLSR

SEQ ID NO: 1088 - protein, 39 aa, Artificial Sequence
  Heteroconjugate construct
DLLKNGERIEKVEGGGDAHKSEVAHRFKDLGEENFKALV

SEQ ID NO: 1089 - protein, 52 aa, Artificial Sequence
  Heteroconjugate construct
DLLKNGERIEKVEGGGSIPPEVKFNKPFVFLMIEQNTKSPLFMGKVVNPTQK

SEQ ID NO: 1090 - protein, 43 aa, Artificial Sequence
  Heteroconjugate construct
DLLKNGERIEKVEGGGSCLQQLSLLMWITQCFLPVFLAQPPSG

SEQ ID NO: 1091 - protein, 13 aa, Artificial Sequence
  Artificial variable sequence
  MISC_FEATURE (1)..(1): X is Asp or Glu
  MISC_FEATURE (2)..(3): X is Ile, Leu or Val
  MISC_FEATURE (4)..(4): X is Lys, Arg or His
  MISC_FEATURE (5)..(5): X is Asn or Gln
  MISC_FEATURE (6)..(6): X is Gly or Ala
  MISC_FEATURE (7)..(7): X is Asp or Glu
  MISC_FEATURE (8)..(8): X is Lys, Arg or His
  MISC_FEATURE (9)..(9): X is Ile, Leu or Val
  MISC_FEATURE (10)..(10): X is Asp or Glu
  misc_feature (11)..(11): Xaa is Lys, Arg or His
  MISC_FEATURE (12)..(12): X is Ile, Leu or Val
  MISC_FEATURE (13)..(13): X is Asp or Glu
XXXXXXXXXXXXX
